(19) United States
(12) Patent Application Publication
(10) Pub. No.: US 2004/0101874 A1
(43) Pub. Date: May 27, 2004

(54) Targets for therapeutic intervention identified in the mitochondrial proteome

(75) Inventors: Soumitra S. Ghosh, San Diego, CA (US); Eoin D. Fahy, San Diego, CA (US); Bing Zhang, Spring, TX (US); Bradford W. Gibson, Berkeley, CA (US); Steven W. Taylor, San Diego, CA (US); Gary M. Glenn, Encinitas, CA (US); Dale E. Warnock, San Diego, CA (US); Sara P. Gaucher, Castro Valley, CA (US)

Correspondence Address: SEED INTELLECTUAL PROPERTY LAW GROUP PLLC, 701 FIFTH AVE, SUITE 6300, SEATTLE, WA, 98104-7092, US

(73) Assignees: MitoKor Inc., San Diego, CA (US); The Buck Institute for Age Research, Novato, CA (US)

(21) Appl. No.: 10/408,765

(22) Filed: Apr. 4, 2003

Related U.S. Application Data
(60) Provisional application No. 60/412,418, filed on Sep. 20, 2002.
(60) Provisional application No. 60/389,987, filed on Jun. 17, 2002.
(60) Provisional application No. 60/372,843, filed on Apr. 12, 2002.

(51) Int. Cl. C12Q 1/68; C12N 1/00

(52) U.S. Cl. 435/6; 435/317.1

(57) ABSTRACT

Mitochondrial targets for drug screening assays and for therapeutic intervention in the treatment of diseases associated with altered mitochondrial function are provided. Complete amino acid sequences [SEQ ID NOS:1-3025] of polypeptides that comprise the human heart mitochondrial proteome are provided, using fractionated proteins derived from highly purified mitochondrial preparations, to identify previously unrecognized mitochondrial molecular components.

### CROSS-REFERENCES TO RELATED APPLICATIONS

[0001] This application claims the benefit of U.S. Provisional Patent Applications No. 60/412,418, filed Sep. 20, 2002; 60/389,987, filed Jun. 17, 2002; and 60/372,843, filed Apr. 12, 2002.

### STATEMENT REGARDING SEQUENCE LISTING SUBMITTED ON CD-ROM

[0002] The Sequence Listing associated with this application is provided on CD-ROM in lieu of a paper copy, and is hereby incorporated by reference into the specification. Three CD-ROMs are provided, containing identical copies of the sequence listing: CD-ROM No. 1 is labeled COPY 1, contains the file 465.app.txt which is 14.4 MB and created on Apr. 4, 2003; CD-ROM No.2 is labeled COPY 2, contains the file 465.app.txt which is 14.4 MB and created on Apr. 4, 2003; CD-ROM No. 3 is labeled CRF, contains the file 465.app.txt which is 14.4 MB and created on Apr. 4, 2003.

### BACKGROUND OF THE INVENTION

[0003] 1. Field of the Invention

[0004] The present invention relates generally to compositions and methods for identifying mitochondrial proteins that are useful as targets for therapeutic intervention in treating diseases associated with altered mitochondrial function. More specifically, the invention is directed to proteomic profiling of proteins and polypeptides of mitochondria and to uses of mitochondrial polypeptides in screening assays for, and as targets of, therapeutic agents.

[0005] 2. Description of the Related Art

[0006] Mitochondria are the complex subcellular organelles that manufacture bioenergetically essential adenosine triphosphate (ATP) by oxidative phosphorylation, and that promote direct and indirect biochemical regulation of a wide array of cellular respiratory, oxidative and metabolic processes, including aerobic respiration and intracellular calcium regulation. For example, mitochondria provide the subcellular site for physiologically important processes such as the Krebs cycle, the urea cycle, fatty acid β-oxidation, and heme synthesis. Mitochondria also participate in mechanisms of apoptosis, or programmed cell death (e.g., Newmeyer et al., Cell 79:353-364,1994; Liu et al., Cell 86:147-157, 1996), which is apparently required for, inter alia, normal development of the nervous system and proper functioning of the immune system.

[0007] Functional mitochondria contain gene products encoded by mitochondrial genes situated in mitochondrial DNA (mtDNA) and by extramitochondrial (e.g., nuclear) genes not situated in the circular mitochondrial genome. While it has been estimated that a functional human mitochondrion contains on the order of 1,000-1,500 distinct proteins (Lopez et al., 2000 Electrophoresis 21:3427; Scheffler, I. E., Mitochondria, 1999 Wiley-Liss, Inc., New York; Rabilloud et al., 1998 Electrophoresis 19:1006; Scheffleretal., 2001 Mitochondrion 1:161; Schatz, G., 1995 Biochem. Biophys. Acta Mol. Basis Dis. 1271:123), the 16.5 kb mtDNA encodes 22 tRNAs, two ribosomal RNAs (12s and 16s rRNA) and only 13 polypeptides, which are enzymes of the electron transport chain (ETC), the elaborate multi-subunit complex mitochondrial assembly where, for example, respiratory oxidative phosphorylation takes place. (See, e.g., Wallace et al., in Mitochondria & Free Radicals in Neurodegenerative Diseases, M. F. Beal, N. Howell and I. BodisWollner, eds., 1997 Wiley-Liss, Inc., New York, pp. 283-307, and references cited therein; see also, e.g., Scheffler, I. E., Mitochondria, 1999Wiley-Liss, Inc., New York.) Mitochondrial DNA thus includes gene sequences encoding seven subunits of NADH dehydrogenase, also known as ETC Complex I (ND1, ND2, ND3, ND4, ND4L, ND5 and ND6); one subunit of ETC Complex III (ubiquinol: cytochrome c oxidoreductase, Cytb); three cytochrome c oxidase (ETC Complex IV) subunits (COX1, COX2 and COX3); and two proton-translocating ATP synthase (Complex V) subunits (ATPase6 and ATPase8). All other mitochondrial constituent polypeptides are presumed to be encoded by genes of the extramitochondrial genome, and the number and identities of a large number of these polypeptides remain unknown. Accordingly, for most of the estimated 25,000-40,000 proteins encoded by the human nuclear genome (Venter et al., 2001 Science 291:1304; Lander et al., 2001 Nature 409:860) little is known regarding subcellular localization, for example, which proteins may be molecular components of mitochondria.

[0008] Mitochondria contain an outer mitochondrial membrane that serves as an interface between the organelle and the cytosol, a highly folded inner mitochondrial membrane that appears to form attachments to the outer membrane at multiple sites, and an intermembrane space between the two mitochondrial membranes. The subcompartment within the inner mitochondrial membrane is commonly referred to as the mitochondrial matrix (for review, see, e.g., Ernster et al., 1981 J. Cell Biol. 91:227s.) The cristae, originally postulated to occur as infoldings of the inner mitochondrial membrane, have recently been characterized using three-dimensional electron tomography as also including tube-like conduits that may form networks, and that can be connected to the inner membrane by open, circular (30 nm diameter) junctions (Perkins et al., 1997, JI. of Struct. Biol. 119:260). While the outer membrane is freely permeable to ionic and non-ionic solutes having molecular weights less than about ten kilodaltons, the inner mitochondrial membrane exhibits selective and regulated permeability for many small molecules, including certain cations, and is impermeable to large (greater than about 10 kD) molecules.

[0009] Four of the five multisubunit protein complexes (Complexes I, III, IV and V) that mediate ETC activity are localized to the inner mitochondrial membrane. The remaining ETC complex (Complex II) is situated in the matrix. In at least three distinct chemical reactions known to take place within the ETC, protons are moved from the mitochondrial matrix, across the inner membrane, to the intermembrane space. This disequilibrium of charged species creates an electrochemical membrane potential of approximately 220 mV referred to as the “protonmotive force” (PMF). The PMF, which is often represented by the notation Δp, corresponds to the sum of the electric potential (Δψm) and the pH differential (ΔpH) across the inner membrane according to the equation

Δp=Δωm−ZΔpH

[0010] wherein Z stands for −2.303 RT/F. The value of Z is −59 at 25° C. when Δp and Δψm are expressed in mV and ΔpH is expressed in pH units (see, e.g., Ernster et al., J. Cell Biol. 91:227s, 1981 and references cited therein).

[0011] Δψm provides the energy for phosphorylation of adenosine diphosphate (ADP) to yield ATP by ETC Complex V, a process that is coupled stoichiometrically with transport of a proton into the matrix. Δψm is also the driving force for the influx of cytosolic Ca²⁺ into the mitochondrion. Under normal metabolic conditions, the inner membrane is impermeable to proton movement from the intermembrane space into the matrix, leaving ETC Complex V as the sole means whereby protons can return to the matrix. When, however, the integrity of the inner mitochondrial membrane is compromised, as occurs during mitochondrial permeability transition (MPT) that accompanies certain diseases associated with altered mitochondrial function, protons are able to bypass the conduit of Complex V without generating ATP, thereby uncoupling respiration. During MPT, Δψm collapses and mitochondrial membranes lose the ability to selectively regulate permeability to solutes both small (e.g., ionic Ca²⁺, Na⁺, K⁺ and H⁺) and large (e.g., proteins).

[0012] A number of diseases, disorders or conditions, including degenerative diseases, are thought to be caused by, or are associated with, alterations in mitochondrial function as provided herein. These disorders include Alzheimer's Disease (AD), diabetes mellitus, Parkinson's Disease (PD), Huntington's disease, Freidreich's ataxia, atherosclerosis, hypertension, ischemia-reperfusion injury, osteoarthritis, inflammatory diseases, amyotrophic lateral sclerosis (ALS), Wilson disease, autosomal recessive hereditary spastic paraplegia, Leigh syndrome, benign and fatal infantile myopathies, multiple sclerosis, dystonia, Leber's hereditary optic neuropathy, schizophrenia, cancer; psoriasis; Down's syndrome, hyperproliferative disorders; mitochondrial diabetes and deafness (MIDD) and myodegenerative disorders such as “mitochondrial encephalopathy, lactic acidosis, and stroke” (MELAS), and “myoclonic epilepsy ragged red fiber syndrome” (MERRF), as well as other mitochondrial respiratory chain diseases (reviewed in Chinnery et al., 1999 J. Med. Genet. 36:425; see also references cited therein). Diseases associated with altered mitochondrial function thus include these and other diseases in which one or more levels of an indicator of altered mitochondrial function differ in a statistically significant manner from the corresponding indicator levels found in clinically normal subjects known to be free of a presence or risk of such disease. Other diseases involving altered metabolism or respiration within cells may also be regarded as diseases associated with altered mitochondrial function, for example, those in which free radicals such as reactive oxygen species (ROS) contribute to pathogenesis. Certain diseases associated with altered mitochondrial function appear to involve states of insufficient apoptosis (e.g., cancer and autoimmune diseases) or excessive levels of apoptosis (e.g., stroke and neurodegeneration). For a general review of apoptosis, and the role of mitochondria therein, see, e.g., Green and Reed, Science 281:1309-1312, 1998; Green, Cell 94:695-698, 1998 and Kromer, Nature Medicine 3:614-620, 1997. The extensive list of additional diseases associated with altered mitochondrial function continues to expand as aberrant mitochondrial or mitonuclear activities are implicated in particular disease processes.

[0013] For instance, free radical production in biological systems is known to result in the generation of reactive species that can chemically modify molecular components of cells and tissues. Such modifications can alter or disrupt structural and/or functional properties of these molecules, leading to compromised cellular activity and tissue damage. Mitochondria are a primary source of free radicals in biological systems (see, e.g., Murphy et al., 1998 in Mitochondria and Free Radicals in Neurodegenerative Diseases, Beal, Howell and Bodis-Woliner, Eds., Wiley-Liss, New York, pp. 159-186 and references cited therein), and altered mitochondrial function, such as failure at any step of the mitochondrial electron transport chain (ETC), may also lead to the generation of highly reactive free radicals. Thus, free radicals generated in biological systems, including free radicals resulting from altered mitochondrial function or from extramitochondrial sources, include reactive oxygen species (ROS), for example, superoxide, peroxynitrite and hydroxyl radicals, and potentially other reactive species that may be toxic to cells. Diseases associated with altered mitochondrial function therefore include disorders in which free radicals contribute to pathogenesis at the molecular level (see, e.g., Halliwell B. and J. M. C. Gutteridge, Free Radicals in Biology and Medicine, 1989 Clarendon Press, Oxford, UK).

[0014] A particularly prevalent example of a disease associated with altered mitochondrial function is type 2 diabetes mellitus, or “late onset” diabetes, a common, degenerative disease affecting 5 to 10 percent of the population in developed countries. The propensity for developing type 2 diabetes mellitus (“type 2 DM”) is reportedly maternally inherited, suggesting a mitochondrial genetic involvement. (Alcolado, J. C. and Alcolado, R., Br. Med. J. 302:1178-1180 (1991); Reny, S. L., International J. Epidem. 23:886-890 (1994)). Diabetes is a heterogeneous disorder with a strong genetic component; monozygotic twins are highly concordant and there is a high incidence of the disease among first degree relatives of affected individuals.

[0015] At the cellular level, the degenerative phenotype that may be characteristic of late onset diabetes mellitus includes indicators of altered mitochondrial respiratory function, for example impaired insulin secretion, decreased ATP synthesis and increased levels of reactive oxygen species. Studies have shown that type 2 DM may be preceded by or associated with certain related disorders. For example, it is estimated that forty million individuals in the U.S. suffer from impaired glucose tolerance (IGT). Following a glucose load, ciruculating glucose concentrations in IGT patients rise to higher levels, and return to baseline levels more slowly, than in unaffected individuals. A small percentage of IGT individuals (5-10%) progress to non-insulin dependent diabetes (NIDDM) each year. This form of diabetes mellitus, type 2 DM, is associated with decreased release of insulin by pancreatic beta cells and a decreased end-organ response to insulin. Other symptoms of diabetes mellitus and conditions that precede or are associated with diabetes mellitus include obesity, vascular pathologies, peripheral and sensory neuropathies and blindness.

[0016] Despite intense effort, nuclear genes that segregate with diabetes mellitus are rare and include, for example, mutations in the insulin gene, the insulin receptor gene and the glucokinase gene. By comparison, although a number of altered mitochondrial genes that segregate with diabetes mellitus have been reported (see generally e.g., PCT/US95/04063), relationships amongst mitochondrial and extramitochondrial factors that contribute to cellular respiratory and/or metabolic activities as they pertain to diabetes remain poorly understood.

[0017] Current pharmacological therapies for type 2 DM include injected insulin, and oral agents that are designed to lower blood glucose levels. Currently available oral agents include (i) the sulfonylureas, which act by enhancing the sensitivity of the pancreatic beta cell to glucose, thereby increasing insulin secretion in response to a given glucose load; (ii) the biguanides, which improve glucose disposal rates and inhibit hepatic glucose output; (iii) the thiazolidinediones, which improve peripheral insulin sensitivity through interaction with nuclear peroxisome proliferator-activated receptors (PPAR, see, e.g., Spiegelman, 1998 Diabetes 47:507-514; Schoonjans et al., 1997 Curr. Opin. Lipidol. 8:159-166; Staels et al., 1997 Biochimie 79:95-99), (iv) repaglinide, which enhances insulin secretion through interaction with ATP-dependent potassium channels; and (v) acarbose, which decreases intestinal absorption of carbohydrates. It is clear that none of the current pharmacological therapies corrects the underlying biochemical defect in type 2 DM. Neither do any of these. currently available treatments improve all of the physiological abnormalities in type 2 DM such as impaired insulin secretion, insulin resistance and/or excessive hepatic glucose output. In addition, treatment failures are common with these agents, such that multi-drug therapy is frequently necessary.

[0018] Clearly there is a need for improved diagnostic methods for early detection of a risk for developing a disease associated with altered mitochondrial function, and for better therapeutics that are specifically targeted to correct biochemical and/or metabolic defects responsible for such disease, regardless of whether such a defect underlying altered mitochondrial function may have mitochondrial or extramitochondrial origins. The present invention provides compositions and methods related to identification of mitochondrial targets for therapeutic intervention in treating these diseases, and offers other related advantages.

### BRIEF SUMMARY OF THE INVENTION

[0019] The present invention provides the identities of 3025 polypeptide sequences [SEQ ID NOS:1-3025] that are constituents of the human mitochondrial proteome. It is therefore an aspect of the present invention to provide a method for identifying a mitochondrial target for therapeutic intervention in treatment of a disease associated with altered mitochondrial function, comprising (a) determining a presence, in a biological sample from a subject known to have or suspected of having a disease associated with altered mitochondrial function, of at least one modified polypeptide, the modified polypeptide comprising at least one modification to a polypeptide having an amino acid sequence as set forth in any one of SEQ ID NOS 1-3025; and (b) correlating the modification with at least one disease associated with altered mitochondrial function, and therefrom identifying a mitochondrial target for therapeutic intervention.

[0020] In certain embodiments the modified polypeptide exhibits altered biological activity. In certain embodiments the biological sample is selected from the group consisting of blood, skin, skeletal muscle, liver and cartilage. In certain embodiments the disease associated with altered mitochondrial function is Alzheimer's disease, diabetes mellitus, Parkinson's disease, Huntington's disease, osteoarthritis, dystonia, Leber's hereditary optic neuropathy (LHON), mitochondrial encephalopathy, lactic acidosis, and stroke (MELAS), myoclonic epilepsy ragged red fiber syndrome (MERRF) or cancer. In certain embodiments the modification is an amino acid substitution, an amino acid insertion, an amino acid deletion, a posttranslational modification or an altered expression level, and in certain further embodiments the posttranslational modification is glycosylation, phosphorylation, nitration, nitrosylation, amidation, fatty acylation or oxidative modification, including, for example, oxidative post-translational modification of tryptophan residues.

[0021] In certain other embodiments the present invention provides a method of identifying an agent for treating a disease associated with altered mitochondrial function, comprising (a) contacting a candidate agent with a biological sample from a subject having a disease associated with altered mitochondrial function, wherein the sample comprises at least one polypeptide that exhibits altered biological activity which accompanies the disease and wherein the polypeptide is (i) a polypeptide having an amino acid sequence as set forth in any one of SEQ ID NOS 1-3025, or (ii) a modified polypeptide that comprises at least one modification to a polypeptide having an amino acid sequence as set forth in any one of SEQ ID NOS 1-3025; and (b) determining an increase or decrease in the altered biological activity of the polypeptide in the presence of the candidate agent relative to the level of the altered biological activity in the absence of the candidate agent, and therefrom identifying an agent for treating a disease associated with altered mitochondrial function.

[0022] In certain embodiments the altered biological activity is an indicator of altered mitochondrial function that is ATP biosynthesis (e.g., an ATP biosynthesis factor), oxidative phosphorylation, mitochondrial calcium uptake, mitochondrial calcium release, maintenance of inner mitochondrial membrane potential, mitochondrial permeability transition, ETC-mediated electron transport or mitochondrial intermembrane space protein release. In certain other embodiments the sample is a cell, a mitochondria enriched sample, an isolated mitochondrion or a submitochondrial particle. In certain embodiments the disease associated with-altered mitochondrial function is Alzheimer's disease, diabetes mellitus, Parkinson's disease, Huntington's disease, osteoarthritis, dystonia, Leber's hereditary optic neuropathy (LHON), mitochondrial encephalopathy, lactic acidosis, and stroke (MELAS), myoclonic epilepsy ragged red fiber syndrome (MERRF) or cancer.

[0023] According to certain other embodiments there is provided by the present invention a method of treating a disease associated with altered mitochondrial function comprising administering to a subject in need thereof an agent that compensates for at least one biological activity of a polypeptide that exhibits altered biological activity which accompanies the disease, wherein the polypeptide is (i) a polypeptide having an amino acid sequence as set forth in any one of SEQ ID NOS 1-3025, or (ii) a modified polypeptide that comprises at least one modification to a polypeptide having an amino acid sequence as set forth in any one of SEQ ID NOS 1-3025. In another embodiment the invention provides a method for identifying a risk for having or a presence of a disease associated with altered mitochondrial function, comprising (a) determining a presence, in a biological sample from a subject suspected of having a disease associated with altered mitochondrial function, of at least one modified polypeptide, the modified polypeptide comprising at least one modification to a polypeptide having an amino acid sequence as set forth in any one of SEQ ID NOS 1-3025, wherein the modification correlates with at least one disease associated with altered mitochondrial function, and therefrom identifying a risk for or presence of disease.

[0024] Certain other embodiments of the invention provide a method of identifying an agent for treating a disease associated with altered mitochondrial function, comprising (a) contacting a candidate agent with an isolated polypeptide that exhibits altered biological activity which accompanies a disease associated with altered mitochondrial function, wherein the polypeptide is selected from the group consisting of (i) a polypeptide having an amino acid sequence as set forth in any one of SEQ ID NOS 1-3025 and (ii) a modified polypeptide that comprises at least one modification to a polypeptide having an amino acid sequence as set forth in any one of SEQ ID NOS 1-3025; and (b) determining an increase or decrease in the altered biological activity of the polypeptide in the presence of the candidate agent relative to the level of the altered biological activity in the absence of the candidate agent, and therefrom identifying an agent for treating a disease associated with altered mitochondrial function. In certain further embodiments the disease associated with altered mitochondrial function is Alzheimer's disease, diabetes mellitus, Parkinson's disease, Huntington's disease, osteoarthritis, dystonia, Leber's hereditary optic neuropathy (LHON), mitochondrial encephalopathy, lactic acidosis, and stroke (MELAS), myoclonic epilepsy ragged red fiber syndrome (MERRF), or cancer. In other further embodiments the isolated polypeptide is present in a preparation that is a submitochondrial particle, a proteoliposome or a mitochondrial protein fraction.

[0025] In another embodiment the invention provides a method of identifying an agent for treating a disease associated with altered mitochondrial function, comprising (a) administering a candidate agent to a subject having a disease associated with altered mitochondrial function; and (b) determining, in a first biological sample obtained from the subject prior to the step of administering the candidate agent and in a second biological sample obtained from the subject subsequent to the step of administering the candidate agent, wherein each of said first and second samples comprises at least one polypeptide that exhibits altered biological activity which accompanies said disease and wherein the polypeptide is selected from the group consisting of (i) a polypeptide having an amino acid sequence as set forth in any one of SEQ ID NOS 1-3025 and (ii) a modified polypeptide that comprises at least one modification to a polypeptide having an amino acid sequence as set forth in any one of SEQ ID NOS 1-3025, an increase or decrease in the altered biological activity of the polypeptide in the second sample relative to the level of the altered biological activity in the first sample, and therefrom identifying an agent for treating a disease associated with altered mitochondrial function. In a further embodiment, the altered biological activity is an indicator of altered mitochondrial function that is ATP biosynthesis, oxidative phosphorylation, calcium uptake, calcium release, maintenance of inner mitochondrial membrane potential, mitochondrial permeability transition, ETC-mediated electron transport or intermembrane space protein release. In another further embodiment the sample is a cell, a mitochondria enriched sample, an isolated mitochondrion or a submitochondrial particle. In certain other further embodiments, the disease associated with altered mitochondrial function is Alzheimer's disease, diabetes mellitus, Parkinson's disease, Huntington's disease, osteoarthritis, dystonia, Leber's hereditary optic neuropathy (LHON), mitochondrial encephalopathy, lactic acidosis, and stroke (MELAS), myoclonic epilepsy ragged red fiber syndrome (MERRF), or cancer.

[0026] These and other aspects of the present invention will become evident upon reference to the following detailed description and attached drawings. In addition, various references are set forth below which describe in more detail certain procedures or compositions and are therefore incorporated by reference in their entireties.

### BRIEF DESCRIPTION OF THE DRAWINGS

[0027] FIG. 1 shows representative western immunoblot analysis (FIG. 1A) of indicated mitochondrial ETC proteins in sucrose density gradient fractionated isolated human heart mitochondria, following resolution of proteins by one-dimensional polyacrylamide gel electrophoresis (FIG. 1B).

[0028] FIG. 2 shows a representative MALDI mass spectrum for a single band excised from a one-dimensional polyacrylamide gel following electrophoretic resolution of proteins from sucrose density gradient fractionated isolated human heart mitochondria. Peptides are from indicated mitochondrial proteins as follows: β=ATP synthase beta subunit, γ=ATP synthase gamma subunit, eCoA=enlyl-CoA hydratase, and vd=voltage dependent anion channel 1 (VDAC-1). (K=keratin.)

[0029] FIG. 3 shows products of tryptophan oxidation in proteins.

[0030] FIG. 4 shows MALDI-TOF mass spectrometry of two peptides from complex I subunit NDUFS4 displaying (A) tryptophan and (B) methionine oxidation. The samples were as follows (i) human heart mitochondria complex I (HHM individual #1) prepared by sucrose density gradient fractionation (SDG) and 1D electrophoresis; (ii) HHM individual #1 prepared by immunocapture and ID electrophoresis (iii) HHM individual #2 prepared by immunocapture and 1D electrophoresis; (iv) HHM individuals #3,4,5 (pooled) prepared by SDG and 1D electrophoresis; (v) bovine heart mitochondria (BHM animal #1) prepared by SDG and 1D electrophoresis; (vi) (BHM animal #2) prepared by SDG and 2D electrophoresis.

[0031] FIG. 5 shows a comparison of the distribution of (a) tryptophan and (b) methionine oxidation for complex I subunit peptides.

### DETAILED DESCRIPTION OF THE INVENTION

[0032] The present invention provides a method for identifying mitochondrial polypeptide targets for therapeutic intervention in the treatment of diseases associated with altered mitochondrial function, and a method for identifying agents for treating such diseases, as well as other related advantages.

[0033] The invention derives from characterization of the human heart mitochondrial proteome as described herein, to arrive at the surprising discovery and recognition for the first time that polypeptides having the amino acid sequences set forth in SEQ ID NOS:1-3025 are mitochondrial molecular components. This unexpected determination, that isolated human mitochondria comprise polypeptides having the amino acid sequences set forth in SEQ ID NOS:1-3025, is usefully combined with methods for determining the presence of a disease associated with altered mitochondrial function, and with methods for determining modification to, and altered biological activity of, a polypeptide, to provide targets for drug-screening assays and for therapeutic agents. According to certain embodiments, the invention relates to determination of at least one modified polypeptide that comprises a modification to a polypeptide having an amino acid sequence as set forth in any one of SEQ ID NOS:1-3025, and according to certain other embodiments the invention relates to determination of a profile comprising a plurality (e.g., two or more) of polypeptides having distinct amino acid sequences wherein at least one such polypeptide has one of the amino sequences set forth in SEQ ID NOS:1-3025, and has not been previously identified as a mitochondrial component.

[0034] Thus, it is an aspect of the present invention to provide a method for identifying a mitochondrial target for therapeutic intervention in treatment of a disease associated with altered mitochondrial function, comprising (a) determining a presence, in a biological sample from a subject known to have or suspected of having a disease associated with altered mitochondrial function, of at least one modified polypeptide, the modified polypeptide comprising at least one modification to a polypeptide having an amino acid sequence as set forth in any one of SEQ ID NOS 1-3025; and (b) correlating the modification with at least one disease associated with altered mitochondrial function, and therefrom identifying a mitochondrial target for therapeutic intervention.

[0035] Biological samples may comprise any tissue or cell preparation containing mitochondria. Biological samples may be provided by obtaining a blood sample, biopsy specimen, tissue explant, organ culture or any other tissue or cell preparation from a subject or a biological source. The subject or biological source may be a human or non-human animal, a primary cell culture or culture adapted cell line including but not limited to genetically engineered cell lines that may contain chromosomally integrated or episomal recombinant nucleic acid sequences, immortal, immortalized or immortalizable cell lines (e.g., capable of at least ten cell doublings in vitro), somatic cell hybrid or cytoplasmic hybrid “cybrid” cell lines (including mitochondrial cybrid cells having nuclear and mitochondrial DNAs of differing biological origins, see, e.g., U.S. Pat. No. 5,888,498 and International Publication No. WO 95/26793), differentiated or differentiatable cell lines, transformed cell lines and the like. In certain preferred embodiments of the invention, the subject or biological source may be suspected of having or being at risk for having a disease associated with altered mitochondrial function, including, for example, altered mitochondrial molecular composition or constitution, or oxidative modification of one or more mitochondrial proteins, and in certain preferred embodiments of the invention the subject or biological source may be known to be free of a risk or presence of such a disease. In certain other preferred embodiments a biological sample comprises a cybrid cell line having nuclear and mitochondrial DNAs of differing biological origins, which in certain embodiments may be a human cell, an immortal cell, a neuronal cell, a neuroblastoma or other transformed cell, for example, a SH-SY5Y human neuroblastoma cell. In certain other particularly preferred embodiments a biological sample comprises a sample readily obtained from a subject or biological source, such as blood, skin, skeletal muscle, liver or cartilage.

[0036] By way of background, mitochondria are comprised of “mitochondrial molecular components”, which may be any protein, polypeptide, peptide, amino acid, or derivative thereof; any lipid, fatty acid or the like, or derivative thereof; any carbohydrate, saccharide or the like or derivative thereof, any nucleic acid, nucleotide, nucleoside, purine, pyrimidine or related molecule, or derivative thereof, or the like; or any other biological molecule that is a constituent of a mitochondrion, which may include molecules that are integral or stable components of mitochondrial structure, and may also include molecules that may transiently associate with mitochondria under certain conditions, for example, regulated intracellular events that involve mitochondria. In the most preferred embodiments, the present invention is directed to compositions and methods that relate to those mitochondrial molecular components that are mitochondrial polypeptides or proteins, although the invention need not be so limited.

[0037] In certain preferred embodiments of the present invention, a mitochondrial protein fraction is derived from the biological sample as provided herein. A protein fraction may be any preparation that contains at least one protein that is present in the sample and which may be obtained by processing a biological sample according to any biological and/or biochemical methods useful for isolating or otherwise separating a protein from its biological source. Those familiar with the art will be able to select an appropriate method depending on the biological starting material and other factors. Such methods may include, but need not be limited to, cell fractionation, density sedimentation, differential extraction, salt precipitation, ultrafiltration, gel filtration, ion-exchange chromatography, partition chromatography, hydrophobic chromatography, reversed-phase chromatography, one- and two-dimensional electrophoresis, affinity techniques or any other suitable separation method.

[0038] It will be noted that in certain particularly preferred embodiments of the present invention, at least one sample as described herein comprises a “mitochondria enriched” sample, which refers to a sample that comprises one or more mitochondria and that is substantially depleted (i.e., partially or fully depleted, where the degree of depletion of a given component can be quantified to show that its presence has been reduced in a statistically significant manner) of one or more non-mitochondrial marker proteins to the extent such markers can be removed from a preparation and are detectable, as described herein and known to the art. Thus, for example, cell fractionation techniques for the enrichment and detection of mitochondria, and/or biochemical markers characteristic of these and other defined organelles, may be used to determine that a particular subcellular fraction containing one or more detectable organelle-specific or organelle-associated markers or polypeptides, as provided herein, is substantially enriched in mitochondria (see, e.g., Ernster et al., 1981 J. Cell Biol. 91:227s; see also, e.g., Rickwood et al., 1987, Mitochondria, a practical approach (Darley-Usmar, R., Wilson,, Ed.), IRL Press; Storrie and Madden, 1990 Methods in Enzymology 182, 203-225).

[0039] For example, and in certain preferred embodiments including methods for determining the presence in a biological sample of a mitochondrial target polypeptide for therapeutic intervention-or for screening a candidate agent for its ability to alter the biological activity of such a target, a mitochondrial molecular component such as any protein or polypeptide having an amino acid sequence as set forth in any one of SEQ ID NOS:1-3025 may be obtained from a preparation of isolated mitochondria and/or from a preparation of isolated submitochondrial particles (SMP). Techniques for isolating mitochondria and for preparing SMP are well known to the person having ordinary skill in the art and may include certain minor modifications as appropriate for the particular conditions selected (e.g., Smith, A. L., Meths. Enzymol. 10:81-86; Darley-Usman et al., (eds.), Mitochondria: A Practical Approach, IRL Press, Oxford, UK; Storrie et al., 1990 Meths. Enzymol. 182:203-255). Cell or tissue lysates, homogenates, extracts, suspensions, fractions or the like, or other preparations containing partially or fully purified mitochondrial molecular components such as mitochondrial proteins (e.g., MCA) may also be useful in these and related embodiments. According to certain other related embodiments, one or more isolated mitochondrial molecular components such as isolated targets for therapeutic intervention in the treatment of a disease associated with altered mitochondrial function may be present in membrane vesicles such as uni- or multilamellar membrane vesicles, or reconstituted into naturally derived or synthetic liposomes or proteoliposomes or similar membrane-bounded compartments, or the like, according to generally accepted methodologies (e.g., Jezek et al., 1990 J. Biol. Chem. 265:10522-10526).

[0040] Affinity techniques are particularly useful-in the context of the present invention, and may include any method that exploits a specific binding interaction with a mitochondrial protein or peptide to effect a separation. Other useful affinity techniques include immunological techniques for isolating specific proteins or peptides, which techniques rely on specific binding interaction between antibody combining sites for antigen and antigenic determinants present in the proteins or peptides. Immunological techniques include, but need not be limited to, immunoaffinity chromatography, immunoprecipitation, solid phase immunoadsorption or other immunoaffinity methods. See, for example, Scopes, R. K., Protein Purification: Principles and Practice, 1987, Springer-Verlag, NY; Weir, D. M., Handbook of Experimental Immunology, 1986, Blackwell Scientific, Boston; Deutscher, M. P., Guide to Protein Purification, 1990, Methods in Enzymology Vol. 182, Academic Press, New York; and Hermanson, G. T. et al., Immobilized Affinity Ligand Techniques, 1992, Academic Press, Inc., California; which are hereby incorporated by reference in their entireties, for details regarding techniques for isolating and characterizing proteins and peptides, including affinity techniques.

[0041] The term “isolated” means that the material is removed from its original environment (e.g., the natural environment if it is naturally occurring). For instance, a naturally occurring protein or peptide present in a living animal is not isolated, but the same protein or peptide, separated from some or all of the co-existing materials in the natural system, is isolated. Thus, for example, such proteins could be part of a multisubunit complex or a membrane vesicle, and/or such peptides could be part of a composition, and still be isolated in that such complex, vesicle or composition is not part of its natural environment.

[0042] “Biological activity” of a protein may be any detectable parameter that directly relates to a condition, process, pathway, dynamic structure, state or other activity involving the protein and that permits detection of altered protein function in a biological sample from a subject or biological source, or in a preparation of the protein isolated therefrom. The methods of the present invention thus pertain in part to such correlation where the protein having biological activity may be, for example, an enzyme, a structural protein, a receptor, a ligand, a membrane channel, a regulatory protein, a subunit, a complex component, a chaperone protein, a binding protein or a protein having a biological activity according to other criteria including those provided herein. Such activity may include the amount of a protein that is present, or the amount of a given protein's function that is detectable.

[0043] “Altered biological activity” of a protein may refer to any condition or state, including those that accompany a disease associated with altered mitochondrial function, for example, a disease or disorder characterized by altered (e.g., increased or decreased in a statistically significant manner relative to an appropriate control) mitochondrial molecular composition or constitution or by modification of a mitochondrial protein as provided herein (and in particular, e.g., a modification to a polypeptide that in its unmodified form comprises an amino acid sequence as set forth in any one of SEQ ID NOS:1-3025), where any structure or activity that is directly or indirectly related to a particular protein's function (or multiple functions) has been changed in a statistically significant manner relative to a control or standard.

[0044] Altered biological activity may have its origin in deletion, substitution or insertion of one or more amino acids in a mitochondrial protein; in posttranslational modification of a mitochondrial protein; in an altered expression level (e.g., a statistically significant increase or decrease in the amount present) of a mitochondrial protein; in oxidatively modified structures or oxidative events as well as in oxidation-independent structures or events, in direct interactions between mitochondrial and extramitochondrial genes and/or their gene products, or in structural or functional changes that occur as the result of interactions between intermediates that may be formed as the result of such interactions, including metabolites, catabolites, substrates, precursors, cofactors and the like. According to certain embodiments as provided herein, altered biological activity of a protein may also result from direct or indirect interaction of a biologically active protein with an introduced agent such as an agent for treating a disease associated with altered mitochondrial function as described herein, for example, a small molecule.

[0045] Additionally, altered biological activity of a mitochondrial protein (including proteins having any amino acid sequence set forth in SEQ ID NOS:1-3025 or modified forms of such proteins as provided herein) may result in altered respiratory, metabolic or other biochemical or biophysical activity in some or all cells of a biological source having a disease associated with altered mitochondrial function. As non-limiting examples, markedly impaired ETC activity may be related to altered biological activity of at least one protein, as may be generation of increased free radicals such as reactive oxygen species (ROS) or defective oxidative phosphorylation. As further examples, altered mitochondrial membrane potential, induction of apoptotic pathways and formation of a typical chemical and biochemical crosslinked species within a cell, whether by enzymatic or non-enzymatic mechanisms, may all be regarded as indicative of altered protein biological activity. Non-limiting examples of altered protein biological activity are described in greater detail below.

[0046] Thus, by way of non-limiting examples, coordinated replication of nuclear and mitochondrial DNA (reviewed in Clayton, D. A., 1992, Int. Rev. Cytol. 141, 217-232; and Shadel and Clayton, 1997, Annu. Rev. Biochem. 66, 409-435), or mitochondrial DNA transcription and RNA processing (Shadel and Clayton, 1996, Methods Enzymol. 264,149-158; Micol et al., 1996, Methods Enzymol. 264,158-173) both incompletely understood processes involving a large number of mitochondrial and extramitochondrial proteins, may be altered mitochondrial functions in certain diseases associated with altered mitochondrial function as provided herein. According to these examples, the disclosure herein—that polypeptides such as those listed in Table 2 alongside the functional classifications such as “carrier”, “DNA synthesis”, “nucleotide metabolism”, “transcription” and “transport”, are mitochondrial components—provides targets for therapeutic intervention in such diseases. In like manner, the disclosure herein that other polypeptides having amino acid sequences as set forth in SEQ ID NOS:1-3025 are mitochondrial components also identifies these proteins as targets for therapeutic intervention in a disease associated with altered mitochondrial function. Moreover, functional classifications of these proteins as recited in Tables 1 and 2 and in the GenBank annotations cited therein (which are incorporated by-reference) provides further guidance to those familiar with the art regarding how readily and without undue experimentation to select a biological activity for interrogation, to determine whether such activity is altered in a sample according to art accepted methodologies.

[0047] According to certain embodiments of the invention, a mitochondrial polypeptide is isolated from a biological sample following exposure of the sample to a “biological stimulus”, which may include any naturally occurring or artificial (including recombinant) compound that is capable of inducing altered biological activity of a mitochondrial molecular component which is, in preferred embodiments, a mitochondrial polypeptide. Thus, a biological stimulus may be employed, according to certain of the subject invention methods, to effect a perturbation of the biological status of a cell in a manner that alters biological activity of a mitochondrial polypeptide, such that the altered activity can be detected using any methodology described or referred to herein or known to the art, for example, according to the mass spectrometric fingerprinting methods described herein and in the cited references. Non-limiting examples of biological stimuli include antibodies, hormones, cytokines, chemokines, biologically active polypeptides and peptides and other soluble mediators, apoptogens, signal transduction agents, small molecules, cations and ionophores, physical and chemical stressors, and the like.

[0048] The polypeptides of the present invention are preferably provided in an isolated form, and in certain preferred embodiments are purified to homogeneity. The terms “fragment,” “derivative” and “analog” when referring to mitochondrial proteins such as polypeptides identified herein as mitochondrial components and having amino acid sequences as set forth in at least one of SEQ ID NOS:1-3025, or when referring to modified polypeptides that comprise at least one modification to a polypeptide having an amino acid sequence as set forth in any one of SEQ ID NOS:1-3025 as provided herein, refers to any polypeptide or protein that retains essentially the same biological function or activity as such polypeptide. Thus, an analog includes a proprotein which can be activated by cleavage of the proprotein portion to produce an active polypeptide.

[0049] The polypeptide (e.g., a human mitochondrial protein or polypeptide having an amino acid sequence set forth in SEQ ID NOS:1-3025) of the present invention may be a naturally occurring, a recombinant polypeptide or a synthetic polypeptide, and is preferably an isolated, naturally occurring polypeptide. Modified polypeptides according to the present invention comprise at least one modification (e.g., a structural change that occurs with statistical significance in a disease associated with altered mitochondrial function) to a protein or polypeptide having an amino acid sequence as set forth in any one of SEQ ID NOS:1-3025. The protein or polypeptide may therefore be an unmodified polypeptide or may be a polypeptide that has been posttranslationally modified, for example by glycosylation (e.g., N-linked glycosylation via asparagines residues, or O-linked glycoslyation via serine or threonine residues or post-biosynthetic glycation, etc.), phosphorylation, oxidation or oxidative modification, nitration, nitrosylation, amidation, fatty acylation including glycosylphosphatidylinositol anchor modification or the like, phospholipase cleavage such as phosphatidylinositol-specific phospholipase c mediated hydrolysis or the like, protease cleavage, dephosphorylation or any other type of protein posttranslational modification such as a modification involving formation or cleavage of a covalent chemical bond, although the invention need not be so limited and also contemplates non-covalent associations of proteins with other biomolecules (e.g., lipoproteins, metalloproteins, etc.). Methods for determining the presence of such modifications are well known in the art (e.g., Scopes, R. K., Protein Purification: Principles and Practice, 1987, Springer-Verlag, NY; Angeletti, Ed., Techniques in Protein Chemistry III, Academic Press, Inc., New York, 1993; Baynes et al., 1991 Diabetes 40:405; Baynes et al., 1999 Diabetes 48:1; Yamakura et al., 1998 J. Biol. Chem. 273:14085; MacMillan et al., 1998 Biochem. 37:1613; see also PCT/US01/14066).

[0050] A fragment, derivative or analog of a mitochondrial molecular component polypeptide or protein may be (i) one in which one or more of the amino acid residues are substituted with a conserved or non-conserved amino acid residue (preferably a conserved amino acid residue) and such substituted amino acid residue may or may not be one encoded by the genetic code, or (ii) one in which one or more of the amino acid residues includes a substituent group, which may include a posttranslational modification or an adduct (e.g., an oxidative adduct), or (iii) one in which one or more of the amino acid residues are deleted, or (iv) one in which additional amino acids are fused to the polypeptide, including a signal sequence, a leader sequence or a proprotein sequence or the like, and also including additional peptide or non-peptide moieties that may be added to proteins such as ubiquitin, glutathione, thioredoxin and the like. Such fragments, derivatives and analogs are deemed to be within the scope of those skilled in the art from the teachings herein.

[0051] The polypeptides of the present invention include mitochondrial polypeptides and proteins having amino acid sequences that are identical or similar to sequences known in the art. As known in the art “similarity” between two polypeptides is determined by comparing the amino acid sequence and conserved amino acid substitutes thereto of the polypeptide to the sequence of a second polypeptide. Fragments or portions of the polypeptides of the present invention may be employed for producing the corresponding full-length polypeptide by peptide synthesis; therefore, the fragments may be employed as intermediates for producing the full-length polypeptides.

[0052] As described herein, isolation of a mitochondrial polypeptide component such as a mitochondrial molecular component with which an agent identified according to the methods of the invention interacts refers to physical separation of such a complex from its biological source, and may be accomplished by any of a number of well known techniques including but not limited to those described herein, and in the cited references. Without wishing to be bound by theory, a compound that “binds a mitochondrial component” can be any discrete molecule, agent compound, composition of matter or the like that may, but need not, directly bind to a mitochondrial molecular component, and may in the alternative bind indirectly to a mitochondrial molecular component by interacting with one or more additional components that bind to a mitochondrial molecular component. These or other mechanisms by which a compound may bind to and/or associate with a mitochondrial molecular component are within the scope of the claimed methods. Binding to a mitochondrial component may under certain conditions result in altered biological activity of the mitochondrial component.

[0053] According to certain preferred embodiments of the present invention, proteins and polypeptides comprising one or more of the amino acid sequences set forth in SEQ ID NOS:1-3025, which include polypeptides not previously known to be mitochondrial components, may be targets for drug screening and/or for therapeutic intervention. A “target” refers to a biochemical entity involved in a biological process, typically a protein that plays a useful role in the physiology or biology of a subject or biological source. A therapeutic composition or compound may bind to, alter the conformation of, impair or enhance the activity of or otherwise influence a target to alter (e.g., increase or decrease in a statistically significant manner relative to an appropriate untreated control) its function. As used herein, targets can include, but need not be limited to, proteins having a mitochondrial function classification as summarized in Table 2 and as described in greater detail below.

[0054] For example, targets may include proteins that are components of, or that associate with, mitochondrial ETC complexes, Krebs cycle or TCA cycle components including any molecules functionally linked (e.g., as substrates, cofactors, intermediates, biochemical donor or acceptor species, or the like) to such components, transport protein or carrier protein assemblies, factors or complexes involved in DNA (including mtDNA) replication or transcription or in translation of mRNA, cellular receptors, G-proteins or G-protein coupled receptors, kinases, phosphatases, ion channels, lipases, phosholipases, nuclear receptors and factors, intracellular structures, components of signal transduction and apoptotic pathways, and the like.

[0055] Methods for identifying a mitochondrial target (e.g., a pharmaceutical target such as a target for therapeutic intervention in a disease associated with altered mitochondrial function as provided herein, for instance, diabetes mellitus, a neurodegenerative disease, a disease associated with inappropriate cell proliferation or cell survival, or a cardiovascular condition) include providing a compound that modulates expression level, structure and/or activity of a particular mitochondrial protein (e.g., a component of the human mitochondrial proteome such as any one or more of the proteins having amino acid sequences set forth in SEQ ID NOS:1-3025) and identifying the cellular component(s) that binds to the compound to form a molecular complex, preferably through a specific interaction.

[0056] “Altered mitochondrial function” may refer to any condition or state, including those that accompany a disease associated with altered mitochondrial function, where any structure or activity that is directly or indirectly related to a mitochondrial function has been changed in a statistically significant manner relative to a control or standard. Altered mitochondrial function may have its origin in extramitochondrial structures or events as well as in mitochondrial structures or events, in direct interactions between mitochondrial and extramitochondrial genes and/or their gene products, or in structural or functional changes that occur as the result of interactions between intermediates that may be formed as the result of such interactions, including metabolites, catabolites, substrates, precursors, cofactors and the like.

[0057] Additionally, altered mitochondrial function may include altered respiratory, metabolic or other biochemical or biophysical activity in one or more cells of a biological sample or a biological source. As non-limiting examples, markedly impaired ETC activity may be related to altered mitochondrial function, as may be generation of increased reactive oxygen species (ROS) or defective oxidative phosphorylation. As further examples, altered mitochondrial membrane potential, induction of apoptotic pathways and formation of a typical chemical and biochemical crosslinked species within a cell, whether by enzymatic or non-enzymatic mechanisms, may all be regarded as indicative of altered mitochondrial function. These and other non-limiting examples of altered mitochondrial function are contemplated by the present invention.

[0058] For instance, altered mitochondrial function may be related, interalia, to altered intracellular calcium regulation that may accompany loss of mitochondrial membrane electrochemical potential by intracellular calcium flux, by mechanisms that include free radical oxidation, defects in transmitochondrial membrane shuttles and transporters such as the adenine nucleotide transporter or the malate-aspartate shuttle, by defects in ATP biosynthesis, by impaired association of hexokinases and/or other enzymes with porin at the inner mitochondrial membrane, or by other events. Altered intracellular calcium regulation and/or collapse of mitochondrial inner membrane potential may result from direct or indirect effects of mitochondrial genes, gene products or related downstream mediator molecules and/or extramitochondrial genes, gene products or related downstream mediators, or from other known or unknown causes.

[0059] Thus, an “indicator of altered mitochondrial function” may be any detectable parameter that directly relates to a condition, process, pathway, dynamic structure, state or other activity involving mitochondria and that permits detection of altered mitochondrial function in a biological sample from a subject or biological source. According to non-limiting theory, altered mitochondrial function therefore may also include altered mitochondrial permeability to calcium or to mitochondrial molecular components involved in apoptosis (e.g., cytochrome c), or other alterations in mitochondrial respiration, or any other altered biological activity as provided herein that is a mitochondrially associated activity.

[0060] In certain preferred embodiments of the invention, an enzyme is the indicator of altered mitochondrial function as provided herein. The enzyme may be a mitochondrial enzyme, which may further be an ETC enzyme or a Krebs cycle enzyme. The enzyme may also be an ATP biosynthesis factor, which may include an ETC enzyme and/or a Krebs cycle enzyme, or other enzymes or cellular components related to ATP production as provided herein. A “non-enzyme” refers to an indicator of altered mitochondrial function that is not an enzyme (i.e., that is not a mitochondrial enzyme or an ATP biosynthesis factor as provided herein). In certain other preferred embodiments, an enzyme is a co-indicator of altered mitochondrial function. The following enzymes may not be indicators of altered mitochondrial function according to the present invention, but may be co-indicators of altered mitochondrial function as provided herein: citrate synthase (EC 4.1.3.7), hexokinase II (EC 2.7.1.1; see, e.g., Kruszynska et al. 1.998), cytochrome c oxidase (EC 1.9.3.1), phosphofructokinase (EC 2.7.1.11), glyceraldehyde phosphate dehydrogenase (EC 1.2.1.12), glycogen phosphorylase (EC 2.4.1.1) creatine kinase (EC 2.7.3.2), NADH dehydrogenase (EC 1.6.5.3), glycerol 3-phosphate dehydrogenase (EC 1.1.1.8), triose phosphate dehydrogenase (EC 1.2.1.12) and malate dehydrogenase (EC 1.1.1.37).

[0061] In other highly preferred embodiments, the indicator of altered mitochondrial function is any ATP biosynthesis factor as described below. In other preferred embodiments, the indicator is ATP production. In other preferred embodiments, the indicator of altered mitochondrial function may be mitochondrial mass or mitochondrial number. According to the present invention, mitochondrial DNA content may not be an indicator of altered mitochondrial function but may be a co-predictor of altered mitochondrial function or a co-indicator of altered mitochondrial function, as provided herein. In other preferred embodiments the indicator of altered mitochondrial function may be free radical production, a cellular response to elevated intracellular calcium or a cellular response to an apoptogen.

[0062] INDICATORS OF ALTERED MITOCHONDRIAL FUNCTION THAT ARE ENZYMES

[0063] As provided herein, in certain preferred embodiments, an altered biological activity comprises an indicator of altered mitochondrial function that may be an enzyme; such an enzyme may be a mitochondrial enzyme or an ATP biosynthesis factor that is an enzyme, for example an ETC enzyme or a Krebs cycle enzyme.

[0064] Reference herein to “enzyme quantity”, “enzyme catalytic activity” or “enzyme expression level” is meant to include a reference to any of a mitochondrial enzyme quantity, activity or expression level or an ATP biosynthesis factor quantity, activity or expression level; either of which may further include, for example, an ETC enzyme quantity, activity or expression level or a Krebs cycle enzyme quantity, activity or expression level. In the most preferred embodiments of the invention, an enzyme is a natural or recombinant protein or polypeptide that has enzyme catalytic activity as provided herein. Such an enzyme may be, by way of non-limiting examples, an enzyme, a holoenzyme, an enzyme complex, an enzyme subunit, an enzyme fragment, derivative or analog or the like, including a truncated, processed or cleaved enzyme.

[0065] A “mitochondrial enzyme” that may be an indicator of altered mitochondrial function as provided herein refers to a mitochondrial molecular component that has enzyme catalytic activity and/or functions as an enzyme cofactor capable of influencing enzyme catalytic activity. As used herein, mitochondria are comprised of “mitochondrial molecular components”, which may be a protein, polypeptide, peptide, amino acid, or derivative thereof; a lipid, fatty acid or the like, or derivative thereof; a carbohydrate, saccharide or the like or derivative thereof, a nucleic acid, nucleotide, nucleoside, purine, pyrimidine or related molecule, or derivative thereof, or the like; or any covalently or non-covalently complexed combination of these components, or any other biological molecule that is a stable or transient constituent of a mitochondrion.

[0066] A mitochondrial enzyme that may be an indicator of altered mitochondrial function or a co-indicator of altered mitochondrial function as provided herein, or an ATP biosynthesis factor that may be an indicator of altered mitochondrial function as provided herein, may comprise an ETC enzyme, which refers to any mitochondrial molecular component that is a mitochondrial enzyme component of the mitochondrial electron transport chain (ETC) complex associated with the inner mitochondrial membrane and mitochondrial matrix. An ETC enzyme may include any of the multiple ETC subunit polypeptides encoded by mitochondrial and nuclear genes. The ETC is typically described as comprising complex I (NADH:ubiquinone reductase), complex II (succinate dehydrogenase), complex III (ubiquinone: cytochrome c oxidoreductase), complex IV (cytochrome c oxidase) and complex V (mitochondrial ATP synthetase), where each complex includes multiple polypeptides and cofactors (for review see, e.g., Walker et al., 1995 Meths. Enzymol. 260:14; Ernster et al., 1981 J. Cell Biol. 91:227s-255s, and references cited therein).

[0067] A mitochondrial enzyme that may be an indicator of altered mitochondrial function as provided herein, or an ATP biosynthesis factor that may be an indicator of altered mitochondrial function as provided herein, may also comprise a Krebs cycle enzyme, which includes mitochondrial molecular components that mediate the series of biochemical/bioenergetic reactions also known as the citric acid cycle or the tricarboxylic acid cycle (see, e.g., Lehninger, Biochemistry, 1975 Worth Publishers, NY; Voet and Voet, Biochemistry, 1990 John Wiley & Sons, NY; Mathews and van Holde, Biochemistry, 1990 Benjamin Cummings, Menlo Park, Calif.). Krebs cycle enzymes include subunits and cofactors of citrate synthase, aconitase, isocitrate dehydrogenase, the α-ketoglutarate dehydrogenase complex, succinyl CoA synthetase, succinate dehydrogenase, fumarase and malate dehydrogenase. Krebs cycle enzymes further include enzymes and cofactors that are functionally linked to the reactions of the Krebs cycle, such as, for example, nicotinamide adenine dinucleotide, coenzyme A, thiamine pyrophosphate, lipoamide, guanosine diphosphate, flavin adenine dinucloetide, acetyl-coA carboxylase (ACC) and nucleoside diphosphokinase.

[0068] The methods of the present invention also pertain in part to the correlation of mitochondrial associated disease with an indicator of altered mitochondrial function that may be an ATP biosynthesis factor, an altered amount of ATP or an altered amount of ATP production.

[0069] An “ATP biosynthesis factor” refers to any naturally occurring cellular component that contributes to the efficiency of ATP production in mitochondria. Such a cellular component may be a protein, polypeptide, peptide, amino acid, or derivative thereof; a lipid, fatty acid or the like, or derivative thereof; a carbohydrate, saccharide or the like or derivative thereof, a nucleic acid, nucleotide, nucleoside, purine, pyrimidine or related molecule, or derivative thereof, or the like. An ATP biosynthesis factor includes at least the components of the ETC and of the Krebs cycle (see, e.g., Lehninger, Biochemistry, 1975 Worth Publishers, NY; Voet and Voet, Biochemistry, 1990 John Wiley & Sons, NY; Mathews and van Holde, Biochemistry, 1990 Benjamin Cummings, Menlo Park, Calif.) and any protein, enzyme or other cellular component that participates in ATP synthesis, regardless of whether such ATP biosynthesis factor is the product of a nuclear gene or of an extranuclear gene (e.g., a mitochondrial gene). Participation in ATP synthesis may include, but need not be limited to, catalysis of any reaction related to ATP synthesis, transmembrane import and/or export of ATP or of an enzyme cofactor, transcription of a gene encoding a mitochondrial enzyme and/or translation of such a gene transcript.

[0070] Compositions and methods for determining whether a cellular component is an ATP biosynthesis factor are well known in the art, and include methods for determining ATP production (including determination of the rate of ATP production in a sample) and methods for quantifying ATP itself. The contribution of an ATP biosynthesis factor to ATP production can be determined, for example, using an isolated ATP biosynthesis factor that is added to cells or to a cell-free system. The ATP biosynthesis factor may directly or indirectly mediate a step or steps in a biosynthetic pathway that influences ATP production. For example, an ATP biosynthesis factor may be an enzyme that catalyzes a particular chemical reaction leading to ATP production. As another example, an ATP biosynthesis factor may be a cofactor that enhances the efficiency of such an enzyme. As another example, an ATP biosynthesis factor may be an exogenous genetic element introduced into a cell or a cell-free system that directly or indirectly affects an ATP biosynthetic pathway. Those having ordinary skill in the art are readily able to compare ATP production by an ATP biosynthetic pathway in the presence and absence of a candidate ATP biosynthesis factor. Routine determination of ATP production may be accomplished using any known method for quantitative ATP detection, for example by way of illustration and not limitation, by differential extraction from a sample optionally including chromatographic isolation; by spectrophotometry; by quantification of labeled ATP recovered from a sample contacted with a suitable form of a detectably labeled ATP precursor molecule such as, for example, ³²P; by quantification of an enzyme activity associated with ATP synthesis or degradation; or by other techniques that are known in the art. Accordingly, in certain embodiments of the present invention, the amount of ATP in a biological sample or the production of ATP (including the rate of ATP production) in a biological sample may be an indicator of altered mitochondrial function. In one embodiment, for instance, ATP may be quantified by measuring luminescence of luciferase catalyzed oxidation of D-luciferin, an ATP dependent process.

[0071] “Enzyme catalytic activity” refers to any function performed by a particular enzyme or category of enzymes that is directed to one or more particular cellular function(s). For example, “ATP biosynthesis factor catalytic activity” refers to any function performed by an ATP biosynthesis factor as provided herein that contributes to the production of ATP. Typically, enzyme catalytic activity is manifested as facilitation of a chemical reaction by a particular enzyme, for instance an enzyme that is an ATP biosynthesis factor, wherein at least one enzyme substrate or reactant is covalently modified to form a product. For example, enzyme catalytic activity may result in a substrate or reactant being modified by formation or cleavage of a covalent chemical bond, but the invention need not be so limited. Various methods of measuring enzyme catalytic activity are known to those having ordinary skill in the art and depend on the particular activity to be determined.

[0072] For many enzymes, including mitochondrial enzymes or enzymes that are ATP biosynthesis factors as provided herein, quantitative criteria for enzyme catalytic activity are well established. These criteria include, for example, activity that may be defined by international units (IU), by enzyme turnover number, by catalytic rate constant (K_{cat}), by Michaelis-Menten constant (Kₘ), by specific activity or by any other enzymological method known in the art for measuring a level of at least one enzyme catalytic activity. Specific activity of a mitochondrial enzyme, such as an ATP biosynthesis factor, may be expressed as units of substrate detectably converted to product per unit time and, optionally, further per unit sample mass (e.g., per unit protein or per unit mitochondrial mass).

[0073] In certain preferred embodiments of the invention, enzyme catalytic activity may be expressed as units of substrate detectably converted by an enzyme to a product per unit time per unit total protein in a sample. In certain particularly preferred embodiments, enzyme catalytic activity may be expressed as units of substrate detectably converted by an enzyme to product per unit time per unit mitochondrial mass in a sample. In certain highly preferred embodiments, enzyme catalytic activity may be expressed as units of substrate detectably converted by an enzyme to product per unit time per unit mitochondrial protein mass in a sample. Products of enzyme catalytic activity may be detected by suitable methods that will depend on the quantity and physicochemical properties of the particular product. Thus, detection may be, for example by way of illustration and not limitation, by radiometric, calorimetric, spectrophotometric, fluorimetric, immunometric or mass spectrometric procedures, or by other suitable means that will be readily apparent to a person having ordinary skill in the art.

[0074] In certain embodiments of the invention, detection of a product of enzyme catalytic activity may be accomplished directly, and in certain other embodiments detection of a product may be accomplished by introduction of a detectable reporter moiety or label into a substrate or reactant such as a marker enzyme, dye, radionuclide, luminescent group, fluorescent group or biotin, or the like. The amount of such a label that is present as unreacted substrate and/or as reaction product, following a reaction to assay enzyme catalytic activity, is then determined using a method appropriate for the specific detectable reporter moiety or label. For radioactive groups, radionuclide decay monitoring, scintillation counting, scintillation proximity assays (SPA) or autoradiographic methods are generally appropriate. For immunometric measurements, suitably labeled antibodies may be prepared including, for example, those labeled with radionuclides, with fluorophores, with affinity tags, with biotin or biotin mimetic sequences or those prepared as antibody-enzyme conjugates (see, e.g., Weir, D. M., Handbook of Experimental Immunology, 1986, Blackwell Scientific, Boston; Scouten, W. H., Methods in Enzymology 135:30-65,1987; Harlow and Lane, Antibodies: A Laboratory Manual, Cold Spring Harbor Laboratory, 1988; Haugland, 1996 Handbook of Fluorescent Probes and Research Chemicals-Sixth Ed., Molecular Probes, Eugene, Oreg.; Scopes, R. K., Protein Purification: Principles and Practice, 1987, Springer-Verlag, NY; Hermanson, G. T. et al., Immobilized Affinity Ligand Techniques, 1992, Academic Press, Inc., NY; Luo et al., 1998 J. Biotechnol. 65:225 and references cited therein). Spectroscopic methods may be used to detect dyes (including, for example, calorimetric products of enzyme reactions), luminescent groups and fluorescent groups. Biotin may be detected using avidin or streptavidin, coupled to a different reporter group (commonly a radioactive or fluorescent group or an enzyme). Enzyme reporter groups may generally be detected by the addition of substrate (generally for a specific period of time), followed by spectroscopic, spectrophotometric or other analysis of the reaction products. Standards and standard additions may be used to determine the level of enzyme catalytic activity in a sample, using well known techniques.

[0075] As noted above, enzyme catalytic activity of an ATP biosynthesis factor may further include other functional activities that lead to ATP production, beyond those involving covalent alteration of a substrate or reactant. For example by way of illustration and not limitation, an ATP biosynthesis factor that is an enzyme may refer to a transmembrane transporter molecule that, through its enzyme catalytic activity, facilitates the movement of metabolites between cellular compartments. Such metabolites may be-ATP or other cellular components involved in ATP synthesis, such as gene products and their downstream intermediates, including metabolites, catabolites, substrates, precursors, cofactors and the like. As another non-limiting example, an ATP biosynthesis factor that is an enzyme may, through its enzyme catalytic activity, transiently bind to a cellular component involved in ATP synthesis in a manner that promotes ATP synthesis. Such a binding event may, for instance, deliver the cellular component to another enzyme involved in ATP synthesis and/or may alter the conformation of the cellular component in a manner that promotes ATP synthesis. Further to this example, such conformational alteration may be part of a signal transduction pathway, an allosteric activation pathway, a transcriptional activation pathway or the like, where an interaction between cellular components leads to ATP production.

[0076] Thus, according to the present invention, an ATP biosynthesis factor may include, as non-limiting examples, an ATP synthase, acetyl-coA carboxylase (ACC) a mitochondrial matrix protein and a mitochondrial membrane protein. Suitable mitochondrial membrane proteins include such mitochondrial components as the adenine nucleotide transporter (ANT; e.g., Fiore et al., 1998 Biochimie 80:137; Klingenberg 1985 Ann. N.Y. Acad. Sci. 456:279), the voltage dependent anion channel (VDAC, also referred to as porin; e.g., Manella, 1997 J. Bioenergetics Biomembr. 29:525), the malate-aspartate shuttle, the mitochondrial calcium uniporter (e.g., Litsky et al., 1997 Biochem. 36:7071), uncoupling proteins (UCP-1, -2, -3; see e.g., Jezek et al., 1998 Int. J. Biochem. Cell Biol. 30:1163), a hexokinase, a peripheral benzodiazepine receptor, a mitochondrial intermembrane creatine kinase, cyclophilin D, a Bcl-2 gene family encoded polypeptide, the tricarboxylate carrier (e.g., lacobazi et al., 1996 Biochim. Biophys. Acta 1284:9; Bisaccia et al., 1990 Biochim. Biophys. Acta 1019:250) and the dicarboxylate carrier (e.g., Fiermonte et al., 1998 J. Biol. Chem. 273:24754; Indiveri et al., 1993 Biochim. Biophys. Acta 1143:310; for a general review of mitochondrial membrane transporters, see, e.g., Zoratti et al., 1994 J. Bioenergetics Biomembr. 26:543 and references cited therein).

[0077] “Enzyme quantity” as used herein refers to an amount of an enzyme including mitochondrial enzymes or enzymes that are ATP biosynthesis factors as provided herein, or of another ATP biosynthesis factor, that is present, i.e., the physical presence of an enzyme or ATP biosynthesis factor selected as an indicator of altered mitochondrial function, irrespective of enzyme catalytic activity. Depending on the physicochemical properties of a particular enzyme or ATP biosynthesis factor, the preferred method for determining the enzyme quantity will vary. In the most highly preferred embodiments of the invention, determination of enzyme quantity will involve quantitative determination of the level of a protein or polypeptide using routine methods in protein chemistry with which those having skill in the art will be readily familiar, for example by way of illustration and not limitation, those described in greater detail below.

[0078] Accordingly, determination of enzyme quantity may be by any suitable method known in the art for quantifying a particular cellular component that is an enzyme or an ATP biosynthesis factor as provided herein, and that in preferred embodiments is a protein or polypeptide. Depending on the nature and physicochemical properties of the enzyme or ATP biosynthesis factor, determination of enzyme quantity may be by densitometric, mass spectrometric, spectrophotometric, fluorimetric, immunometric, chromatographic, electrochemical or any other means of quantitatively detecting a particular cellular component. Methods for determining enzyme quantity also include methods described above that are useful for detecting products of enzyme catalytic activity, including those measuring enzyme quantity directly and those measuring a detectable label or reporter moiety. In certain preferred embodiments of the invention, enzyme quantity is determined by immunometric measurement of an isolated enzyme or ATP biosynthesis factor. In certain preferred embodiments of the invention, these and other immunological and immunochemical techniques for quantitative determination of biomolecules such as an enzyme or ATP biosynthesis factor may be employed using a variety of assay formats known to those of ordinary skill in the art, including but not limited to enzyme linked immunosorbent assay (ELISA), radioimmunoassay (RIA), immunofluorimetry, immunoprecipitation, equilibrium dialysis, immunodiffusion and other techniques. (See, e.g., Harlow and Lane, Antibodies: A Laboratory Manual, Cold Spring Harbor Laboratory, 1988; Weir, D. M., Handbook of Experimental Immunology, 1986, Blackwell Scientific, Boston.) For example, the assay may be performed in a Western blot format, wherein a preparation comprising proteins from a biological sample is submitted to gel electrophoresis, transferred to a suitable membrane and allowed to react with an antibody specific for an enzyme or an ATP biosynthesis factor that is a protein or polypeptide. The presence of the antibody on the membrane may then be detected using a suitable detection reagent, as is well known in the art and described above.

[0079] INDICATORS OF ALTERED MITOCHONDRIAL FUNCTION THAT ARE CELLULAR RESPONSES TO ELEVATED INTRACELLULAR CALCIUM

[0080] According to certain embodiments of the present invention, a method is provided that comprises in pertinent part determining a biological activity of a mitochondrial polypeptide by monitoring intracellular calcium homeostasis and/or cellular responses to perturbations of this homeostasis, including physiological and pathophysiological calcium regulation. In particular, according to these embodiments, the method of the present invention is directed to comparing a cellular response to elevated intracellular calcium in a biological sample in the presence and absence of a candidate agent, or to comparing such a response in a sample from a subject known or suspected of having a disease associated with altered mitochondrial function with that of a control subject. The range of cellular responses to elevated intracellular calcium is broad, as is the range of methods and reagents for the detection of such responses. Many specific cellular responses are known to those having ordinary skill in the art; these responses will depend on the particular cell types present in a selected biological sample. It is within the contemplation of the present invention to provide a method comprising comparing a cellular response to elevated intracellular calcium, where such response is an indicator of altered mitochondrial function as provided herein. As non-limiting examples, cellular responses to elevated intracellular calcium include secretion of specific secretory products, exocytosis of particular preformed components, increased glycogen metabolism and cell proliferation (see, e.g., Clapham, 1995 Cell 80:259; Cooper, The Cell—A Molecular Approach, 1997 ASM Press, Washington, D.C.; Alberts, B., Bray, D., et al., Molecular Biology of the Cell, 1995 Garland Publishing, NY).

[0081] As a brief background, normal alterations of intramitochondrial Ca²⁺ are associated with normal metabolic regulation (Dykens, 1998 in Mitochondria & Free Radicals in Neurodegenerative Diseases, Beal, Howell and Bodis-Wollner, Eds., Wiley-Liss, New York, pp.29-55; Radi et al., 1998 in Mitochondria & Free Radicals in Neurodegenerative Diseases, Beal, Howell and Bodis-Wollner, Eds., Wiley-Liss, New York, pp. 57-89; Gunter and Pfeiffer, 1991, Am. J. Physiol. 27: C755; Gunter et al., 1994, Am. J. Physiol. 267: 313). For example, fluctuating levels of mitochondrial free Ca²⁺ may be responsible for regulating oxidative metabolism in response to increased ATP utilization, via allosteric regulation of enzymes (reviewed by Crompton et al., 1993 Basic Res. Cardiol. 88: 513-523;) and the glycerophosphate shuttle (Gunter et al., 1994 J. Bioenerg. Biomembr. 26: 471).

[0082] Normal mitochondrial function includes regulation of cytosolic free calcium levels by sequestration of excess Ca²⁺ within the mitochondrial matrix. Depending on cell type, cytosolic Ca²⁺ concentration is typically 50-100 nM. In normally functioning cells, when Ca²⁺ levels reach 200-300 nM, mitochondria begin to accumulate Ca²⁺ as a function of the equilibrium between influx via a Ca²⁺ uniporter in the inner mitochondrial membrane and Ca²⁺ efflux via both Na⁺ dependent and Na⁺ independent calcium carriers. In certain instances, such perturbation of intracellular calcium homeostasis is a feature of diseases associated with altered mitochondrial function, regardless of whether the calcium regulatory dysfunction is causative of, or a consequence of, altered mitochondrial function.

[0083] Elevated mitochondrial calcium levels thus may accumulate in response to an initial elevation in cytosolic free calcium, as described above. Such elevated mitochondrial calcium concentrations in combination with reduced ATP or other conditions associated with mitochondrial pathology, can lead to collapse of mitochondrial inner membrane potential (see Gunter et al., 1998 Biochim. Biophys. Acta 1366:5; Rottenberg and Marbach, 1990, Biochim. Biophys. Acta 1016:87). Generally, in order to practice the subject invention methods, the extramitochondrial (cytosolic) level of Ca²⁺ in a biological sample is greater than that present within mitochondria. For example, in the case of type 2 diabetes mellitus (type 2 DM), mitochondrial or cytosolic calcium levels may vary from the above ranges and may range from, e.g., about 1 nM to about 500 mM, more typically from about 10 nM to about 100 μM and usually from about 20 nM to about 1 μM, where “about” indicates ±10%. A variety of calcium indicators are known in the art, including but not limited to, for example, fura-2 (McCormack et al., 1989 Biochim. Biophys. Acta 973:420); magfura-2; BTC (U.S. Pat. No. 5,501,980); fluo-3, fluo-4 and fluo-5N (U.S. Pat. No. 5,049,673); rhod-2; benzothiaza-1; and benzothiaza-2 (all of which are available from Molecular Probes, Eugene, Oreg.). These or any other means for monitoring intracellular calcium are contemplated according to the subject invention method for identifying a risk for type 2 DM.

[0084] For monitoring an indicator of altered mitochondrial function that is a cellular response to elevated intracellular calcium, compounds that induce increased cytoplasmic and mitochondrial concentrations of Ca²⁺, including calcium ionophores, are well known to those of ordinary skill in the art, as are methods for measuring intracellular calcium and intramitochondrial calcium (see, e.g., Gunter and Gunter, 1994 J. Bioenerg. Biomembr. 26: 471; Gunter et al., 1998 Biochim. Biophys. Acta 1366:5; McCormack et al., 1989 Biochim. Biophys. Acta 973:420; Orrenius and Nicotera, 1994 J. Neural. Transm. Suppl. 43:1; Leist and Nicotera, 1998 Rev. Physiol. Biochem. Pharmacol. 132:79; and Haugland, 1996 Handbook of Fluorescent Probes and Research Chemicals-Sixth Ed., Molecular Probes, Eugene, Oreg.). Accordingly, a person skilled in the art may readily select a suitable ionophore (or another compound that results in increased cytoplasmic and/or mitochondrial concentrations of Ca²⁺) and an appropriate means for detecting intracellular and/or intramitochondrial calcium for use in the present invention, according to the instant disclosure and to well known methods.

[0085] Ca²⁺ influx into mitochondria appears to be largely dependent, and may be completely dependent, upon the negative transmembrane electrochemical potential (Δψ) established at the inner mitochondrial membrane by electron transfer, and such influx fails to occur in the absence of Δψ even when an eight-fold Ca²⁺ concentration gradient is imposed (Kapus et al., 1991 FEBS Lett. 282:61). Accordingly, mitochondria may release Ca²⁺ when the membrane potential is dissipated, as occurs with uncouplers like 2,4-dinitrophenol and carbonyl cyanide p-trifluoro-methoxyphenylhydrazone (FCCP). Thus, according to certain embodiments of the present invention, collapse of Δψ may be potentiated by influxes of cytosolic free calcium into the mitochondria, as may occur under certain physiological conditions including those encountered by cells of a subject having type 2 DM. Detection of such collapse may be accomplished by a variety of means as provided herein.

[0086] Typically, mitochondrial membrane potential may be determined according to methods with which those skilled in the art will be readily familiar, including but not limited to detection and/or measurement of detectable compounds such as fluorescent indicators, optical probes and/or sensitive pH and ion-selective electrodes (See, e.g., Ernster et al., 1981 J. Cell Biol. 91:227s and references cited; see also Haugland, 1996 Handbook of Fluorescent Probes and Research Chemicals-Sixth Ed., Molecular Probes, Eugene, Oreg., pp.266-274 and 589-594.). For example, by way of illustration and not limitation, the fluorescent probes 2-,4-dimethylaminostyryl-N-methyl pyridinium (DASPMI) and tetramethylrhodamine esters (such as, e.g., tetramethylrhodamine methyl ester, TMRM; tetramethylrhodamine ethyl ester, TMRE) or related compounds (see, e.g., Haugland, 1996, supra) may be quantified following accumulation in mitochondria, a process that is dependent on, and proportional to, mitochondrial membrane potential (see, e.g., Murphy et al., 1998 in Mitochondria & Free Radicals in Neurodegenerative Diseases, Beal, Howell and Bodis-Wollner, Eds., Wiley-Liss, New York, pp.159-186 and references cited therein; and Molecular Probes On-line Handbook of Fluorescent Probes and Research Chemicals, at http://www.probes.com/handbook/toc.html). Other fluorescent detectable compounds that may be used in the invention include but are not limited to rhodamine 123, rhodamine B hexyl ester, DiOC₆(3), JC-1 [5,5′,6,6′-Tetrachloro-1,1′,3,3′-Tetraethylbezimidazolcarbocyanine Iodide] (see Cossarizza, et al., 1993 Biochem. Biophys. Res. Comm. 197:40; Reers et al., 1995 Meth. Enzymol. 260:406), rhod-2 (see U.S. Pat. No. 5,049,673; all of the preceding compounds are available from Molecular Probes, Eugene, Oreg.) and rhodamine 800 (Lambda Physik, GmbH, Göttingen, Germany; see Sakanoue et al., 1997 J. Biochem. 121:29). Methods for monitoring mitochondrial membrane potential are also disclosed in U.S. application Ser. No. 09/161,172.

[0087] Mitochondrial membrane potential can also be measured by nonfluorescent means, for example by using TTP (tetraphenylphosphonium ion) and a TTP-sensitive electrode (Kamo et al., 1979 J. Membrane Biol. 49:105; Porter and Brand, 1995 Am. J. Physiol. 269:R1213). Those skilled in the art will be able to select appropriate detectable compounds or other appropriate means for measuring Δψm. By way of example and not limitation, TMRM is somewhat preferable to TMRE because, following efflux from mitochondria, TMRE yields slightly more residual signal in the endoplasmic reticulicum and cytoplasm than TMRM.

[0088] As another non-limiting example, membrane potential may be additionally or alternatively calculated from indirect measurements of mitochondrial permeability to detectable charged solutes, using matrix volume and/or pyridine nucleotide redox determination combined with spectrophotometric or fluorimetric quantification. Measurement of membrane potential dependent substrate exchange-diffusion across the inner mitochondrial membrane may also provide an indirect measurement of membrane potential. (See, e.g., Quinn, 1976, The Molecular Biology of Cell Membranes, University Park Press, Baltimore, Md., pp. 200-217 and references cited therein.)

[0089] Exquisite sensitivity to extraordinary mitochondrial accumulations of Ca²⁺ that result from elevation of intracellular calcium, as described above, may also characterize type 2 DM. Such mitochondrial sensitivity may provide an indicator of altered mitochondrial function according to the present invention. Additionally, a variety of physiologically pertinent agents, including hydroperoxide and free radicals, may synergize with Ca²⁺ to induce collapse of Δψ (Novgorodov et al., 1991 Biochem. Biophys. Acta 1058: 242; Takeyama et al., 1993 Biochem. J. 294:719; Guidox et al., 1993 Arch. Biochem. Biophys. 306:139).

[0090] INDICATORS OF ALTERED MITOCHONDRIAL FUNCTION THAT ARE CELLULAR RESPONSES TO APOPTOGENIC STIMULI

[0091] Turning to another aspect, the present invention relates to the correlation of diseases associated with altered mitochondrial function with an indicator of altered mitochondrial function, involving programmed cell death or apoptosis. In particular, according to this aspect, the present invention is directed to a method comprising comparing a cellular response to an apoptosis-inducing (“apoptogenic”) stimulus in a biological sample from (i) a subject believed to be at risk for disease, and (ii) a control subject. The range of cellular responses to various known apoptogenic stimuli is broad, as is the range of methods and reagents for the detection of such responses. It is within the contemplation of the present invention to provide a method for identifying a risk for disease by comparing a cellular response to an apoptogenic stimulus, where such response is an indicator of altered mitochondrial function as provided herein.

[0092] By way of background, mitochondrial dysfunction is thought to be critical in the cascade of events leading to apoptosis in various cell types (Kroemer et al., FASEB J. 9:1277-87, 1995). Altered mitochondrial physiology may be among the earliest events in programmed cell death (Zamzami et al., J. Exp. Med. 182:367-77, 1995; Zamzami et al., J. Exp. Med. 181:1661-72, 1995) and elevated reactive oxygen species (ROS) levels that result from such altered mitochondrial function may initiate the apoptotic cascade (Ausserer et al., Mol. Cell. Biol. 14:5032-42,1994). In several cell types, reduction in the mitochondrial membrane potential (Δψm) precedes the nuclear DNA degradation that accompanies apoptosis. In cell-free systems, mitochondrial, but not nuclear, enriched fractions are capable of inducing nuclear apoptosis (Newmeyer et al., Cell 70:353-64, 1994). Perturbation of mitochondrial respiratory activity leading to altered cellular metabolic states, such as elevated intracellular ROS, may occur in certain diseases associated with altered mitochondrial function (e.g., type 2 DM) and may further induce pathogenetic events via apoptotic mechanisms.

[0093] Oxidatively stressed mitochondria may release a pre-formed soluble factor that can induce chromosomal condensation, an event preceding apoptosis (Marchetti et al., Cancer Res. 56:2033-38, 1996). In addition, members of the Bcl-2 family of anti-apoptosis gene products are located within the outer mitochondrial membrane (Monaghan et al., J. Histochem. Cytochem. 40:1819-25,1992) and these proteins appear to protect membranes from oxidative stress (Korsmeyer et al, Biochim. Biophys. Act. 1271:63, 1995). Localization of Bcl-2 to this membrane appears to be indispensable for modulation of apoptosis (Nguyen et al., J. Biol. Chem. 269:16521-24, 1994). Thus, changes in mitochondrial physiology may be important mediators of apoptosis.

[0094] Altered mitochondrial function, may therefore lower the threshold for induction of apoptosis by an apoptogen. A variety of apoptogens are known to those familiar with the art (see, e.g., Green et al., 1998 Science 281:1309 and references cited therein) and may include by way of illustration and not limitation: tumor necrosis factor-alpha (TNF-α); Fas ligand; glutamate; N-methyl-D-aspartate (NMDA); interleukin-3 (IL-3); herbimycin A (Mancini et al., 1997 J. Cell. Biol. 138:449-469); paraquat (Costantini et al., 1995 Toxicology 99:1-2); ethylene glycols; protein kinase inhibitors, such as, e.g. staurosporine, calphostin C, caffeic acid phenethyl ester, chelerythrine chloride, genistein; 1-(5-isoquinolinesulfonyl)-2-methylpiperazine; N-[2-((p-bromocinnamyl)amino)ethyl]-5-5-isoquinolinesulfonamide; KN-93; quercitin; d-erythro-sphingosine derivatives; UV irradiation; ionophores such as, e.g.: ionomycin and valinomycin; MAP kinase inducers such as, e.g.: anisomycin, anandamine; cell cycle blockers such as, e.g.: aphidicolin, colcemid, 5-fluorouracil, homoharringtonine; acetylcholinesterase inhibitors such as, e.g. berberine; anti-estrogens such as, e.g.: tamoxifen; pro-oxidants, such as, e.g.,: tert-butyl peroxide, hydrogen peroxide; free radicals such as, e.g., nitric oxide; inorganic metal ions, such as, e.g., cadmium; DNA synthesis inhibitors such as, e.g.: actinomycin D; DNA intercalators such as, e.g., doxorubicin, bleomycin sulfate, hydroxyurea, methotrexate, mitomycin C, camptothecin, daunorubicin; protein synthesis inhibitors such as, e.g., cycloheximide, puromycin, rapamycin; agents that affect microtubulin formation or stability such as, e.g.: vinblastine, vincristine, colchicine, 4-hydroxyphenylretinamide, paclitaxel; Bad protein, Bid protein and Bax protein (see, e.g., Jurgenmeier et al., 1998 Proc. Nat. Acad. Sci. USA 95:4997-5002 and references cited therein); calcium and inorganic phosphate (Kroemer et al., 1998 Ann. Rev. Physiol. 60:619).

[0095] In one embodiment of the subject invention method wherein the indicator of altered mitochondrial function is a cellular response to an apoptogen, cells in a biological sample that are suspected of undergoing apoptosis may be examined for morphological, permeability or other changes that are indicative of an apoptotic state. For example by way of illustration and not limitation, apoptosis in many cell types may cause altered morphological appearance such as plasma membrane blebbing, cell shape change, loss of substrate adhesion properties or other morphological changes that can be readily detected by a person having ordinary skill in the art, for example by using light microscopy. As another example, cells undergoing apoptosis may exhibit fragmentation and disintegration of chromosomes, which may be apparent by microscopy and/or through the use of DNA-specific or chromatin-specific dyes that are known in the art, including fluorescent dyes. Such cells may also exhibit altered plasma membrane permeability properties as may be readily detected through the use of vital dyes (e.g., propidium iodide, trypan blue) or by the detection of lactate dehydrogenase leakage into the extracellular milieu. These and other means for detecting apoptotic cells by morphologic criteria, altered plasma membrane permeability and related changes will be apparent to those familiar with the art.

[0096] In another embodiment of the subject invention method wherein the indicator of altered mitochondrial function is a cellular response to an apoptogen, cells in a biological sample may be assayed for translocation of cell membrane phosphatidylserine (PS) from the inner to the outer leaflet of the plasma membrane, which may be detected, for example, by measuring outer leaflet binding by the PS-specific protein annexin. (Martin et al., J. Exp. Med. 182:1545,1995; Fadok et al., J. Immunol. 148:2207,1992.) In still another embodiment of this aspect of the invention, a cellular response to an apoptogen is determined by an assay for induction of specific protease activity in any member of a family of apoptosis-activated proteases known as the caspases (see, e.g., Green et al., 1998 Science 281:1309). Those having ordinary skill in the art will be readily familiar with methods for determining caspase activity, for example by determination of caspase-mediated cleavage of specifically recognized protein substrates. These substrates may include, for example, poly-(ADP-ribose) polymerase (PARP) or other naturally occurring or synthetic peptides and proteins cleaved by caspases that are known in the art (see, e.g., Ellerby et al., 1997 J. Neurosci. 17:6165). The synthetic peptide Z-Tyr-Val-Ala-Asp-AFC (SEQ ID NO: ______;), wherein “Z” indicates a benzoyl carbonyl moiety and AFC indicates 7-amino-4-trifluoromethylcoumarin (Kluck et al., 1997 Science 275:1132; Nicholson et al., 1995 Nature 376:37), is one such substrate. Other non-limiting examples of substrates include nuclear proteins such as U1-70 kDa and DNA-PKcs (Rosen and Casciola-Rosen, 1997 J. Cell. Biochem. 64:50; Cohen, 1997 Biochem. J. 326:1).

[0097] As described above, the mitochondrial inner membrane may exhibit highly selective and regulated permeability for many small solutes, but is impermeable to large (>˜10 kDa) molecules. (See, e.g., Quinn, 1976 The Molecular Biology of Cell Membranes, University Park Press, Baltimore, Md.). In cells undergoing apoptosis, however, collapse of mitochondrial membrane potential may be accompanied by increased permeability permitting macromolecule diffusion across the mitochondrial membrane. Thus, in another embodiment of the subject invention method wherein the indicator of altered mitochondrial function is a cellular response to an apoptogen, detection of a mitochondrial protein, for example cytochrome c that has escaped from mitochondria in apoptotic cells, may provide evidence of a response to an apoptogen that can be readily determined. (Liu et al., Cell 86:147, 1996) Such detection of cytochrome c may be performed spectrophotometrically, immunochemically or by other well established methods for determining the presence of a specific protein.

[0098] For instance, release of cytochrome c from cells challenged with apoptotic stimuli (e.g., ionomycin, a well known calcium ionophore) can be followed by a variety of immunological methods. Matrix-assisted laser desorption ionization time-of-flight (MALDI-TOF) mass spectrometry coupled with affinity capture is particularly suitable for such analysis since apo-cytochrome c and holo-cytochrome c can be distinguished on the basis of their unique molecular weights. For example, the Surface-Enhanced Laser Desorption/lonization (SELDI™) system (Ciphergen, Palo Alto, Calif.) may be utilized to detect cytochrome c release from mitochondria in apoptogen treated cells. In this approach, a cytochrome c specific antibody immobilized on a solid support is used to capture released cytochrome c present in a soluble cell extract. The captured protein is then encased in a matrix of an energy absorption molecule (EAM) and is desorbed from the solid support surface using pulsed laser excitation. The molecular mass of the protein is determined by its time of flight to the detector of the SELDI™ mass spectrometer.

[0099] A person having ordinary skill in the art will readily appreciate that there may be other suitable techniques for quantifying apoptosis, and such techniques for purposes of determining an indicator of altered mitochondrial function that is a cellular response to an apoptogenic stimulus are within the scope of the methods provided by the present invention.

[0100] As noted above, an increasing number of diseases, disorders and conditions have been identified as diseases associated with altered mitochondrial function as provided herein, such that given the present disclosure and the state of the art with respect to methods for assessing mitochondrial function and with respect to clinical signs and symptoms of such diseases, the person having ordinary skill in the art can readily determine criteria for establishing a statistically significant deviation from a normal range for one or more parameters that are appropriate to the definition of the disease, in order to establish that a disease associated with altered mitochondrial function is present. As an illustrative example, where it is desirable to determine whether or not a subject or biological source falls within clinical parameters indicative of type 2 diabetes mellitus, signs and symptoms of type 2 diabetes that are accepted by those skilled in the art may be used to so designate a subject or biological source, for example clinical signs referred to in Gavin et al. (Diabetes Care 22(suppl. 1):S5-S19,1999, American Diabetes Association Expert Committee on the Diagnosis and Classification of Diabetes Mellitus) and references cited therein, or other means known in the art for diagnosing type 2 diabetes. Similarly, those familiar with the art will be aware of art accepted criteria for determining the presence of other diseases associated with altered mitochondrial function as provided herein.

[0101] Hence, the person having ordinary skill in the art can “correlate” one or more parameters described herein (e.g., mitochondrial functions) with such a disease associated with altered mitochondrial function, in view of the present disclosure and based on familiarity with the art. Briefly, statistically significant deviation from a normal, disease-free range for any of a number of clinical signs and symptoms and/or criteria for mitochondrial function, permits determination of the statistically significant coincidence of such parameter(s) with disease. Such deviation can further be confirmed, for instance, by comparing the same parameters and criteria that are detected in disease to those in a suitable control sample, in this case a control derived from a subject known to be free of a risk for having, or presence of, such disease.

[0102] Accordingly, given the disclosure of the instant application, and in particular the identification of the polypeptide sequences set forth in SEQ ID NOS:1-3025 as belonging to a defined human mitochondrial proteome, the present invention provides a control set of polypeptides such that a sample may be analyzed for the presence of at least one modified polypeptide as described herein, in order to so “correlate” such modification with a disease associated with altered mitochondrial function. Establishing such a correlation then provides a target for screening assays to identify an agent suitable for therapeutic intervention, i.e., an agent that beneficially counteracts the disease-associated alteration in mitochondrial function. Without wishing to be bound by theory, a target for therapeutic intervention preferably contributes to the pathogenesis of disease by exhibiting undesirably altered biological activity, such that a therapeutic agent reverses such alteration to a control range. The invention need not, however, be so limited, as even in situations where the target identified according to the subject invention method is a surrogate marker of disease, such a target nevertheless may be restored to a normal control range by a therapeutic agent regardless of whether the interaction is direct, in a manner that ameliorates disease. In certain embodiments the invention further provides for determination of altered biological activity in such a modified polypeptide, as also described herein.

[0103] According to the present invention, there are provided compositions and methods for the identification of differential protein expression at the organellar proteome level (e.g., the mitochondrial proteome), in a sub-proteomic, complex mixture of proteins or at the level of a single targeted protein. The invention thus relates in pertinent part to the unexpected advantages associated with the unique physicochemical properties of particular organelle-derived (e.g., mitochondria) polypeptides, peptides (e.g., peptide fragments) and proteins, in conjunction with biochemical (including immunochemical) methods, modern spectrometry and protein bioinformatics software tools to identify peptides and proteins that are detected as differentially expressed products, and to identify previously unrecognized peptides and proteins as molecular components of a particular organelle (e.g., mitochondrial molecular components as provided herein).

[0104] The invention also relates in pertinent part to the surprising advantages offered by the use of an organelle enriched sample fraction (e.g., a mitochondria enriched sample as provided herein). Determining the pattern of differential protein expression (e.g., absence or presence of one or more particular proteins in a sample; structural modification of a particular protein; or other altered expression such as a statistically significant increase or decrease in the amount of one or more particular proteins in a sample when normalized to a control) at the peptide and/or protein level in a complex protein mixture obtained from a biological sample as provided herein (i.e., at the proteomic level) provides, in certain embodiments, targets for drug screening assays and for therapeutic intervention in specific disease states. Accordingly, in certain embodiments the invention provides methods for evaluating the effects of candidate therapeutic agents (e.g., drugs or biological stimuli as provided herein) on biological activity of a mitochondrial protein, for example, where the protein exhibits altered biological activity due to one or more of a modification such as a mutation (insertion, deletion and/or substitution of one or more amino acids), a posttranslational modification or an altered level of protein expression. Thus, in certain embodiments, such candidate agents may cause one or more specific alterations (e.g., increases or decreases in a statistically significant manner) in the biological activity of a mitochondrial protein, preferably in some beneficial fashion.

[0105] As also noted elsewhere herein, certain embodiments of the invention relate in pertinent part to isolating at least one mitochondrial polypeptide according to any of a variety of biochemical separation methodologies for isolating a polypeptide as known in the art and as provided herein (see, e.g., Scopes, 1987 Protein Purification: Principles and Practice, Springer-Verlag, NY; Deutscher, 1990 Meths. Enzymol. Vol. 182; Nilsson et al., 2000 Mass Spectrom. Rev. 19:390; Godovac-Zimmermann et al., 2001 Mass Spectrom. Rev. 20:1; Gatlin et al., 2000 Anal. Chem. 72:757; Link et al., 1999 Nat. Biotechnol. 17:676). Hence, as provided herein and as known to the art, such methodologies for isolating a mitochondrial polypeptide may exploit physicochemical and hydrodynamic properties of the polypeptide, including, for example, the approximate apparent molecular mass of the polypeptide, the amino acid sequence of the polypeptide, and in certain contemplated embodiments, the apparent approximate isolelectric focusing point of the polypeptide.

[0106] As is well known to those having ordinary skill in the art, variability in biological sample source and condition, extraction reagents and methods, separation media and instrumentation, analytical apparatus and the like, may account for differences in values observed for such properties of polypeptides as molecular mass and isoelectric focusing point. Hence, it will be understood that an “apparent” molecular mass or isoelectric focusing point refers to that which is detected in a particular rendition of a particular isolation procedure, although the value detected for such a parameter may vary among separate isolations; similarly those familiar with the art will appreciate that from among the variables listed above, including imprecision in instrumentation, apparent values may vary in a manner that renders a particular value that is detected only an “approximation” of the actual parameter being measured. Thus, according to certain embodiments of the present invention a mitochondrial polypeptide may be isolated on the basis of approximate apparent molecular mass, apparent approximate isoelectric focusing point and/or amino acid sequence, which parameters may be susceptible to some variability for reasons discussed above but which, in any event, will permit isolation of such a polypeptide as provided herein.

[0107] The isolated polypeptide is then contacted with a proteolytic agent to generate a plurality of derivative peptide fragments, from which a mass spectrum can be generated to permit determination of the presence, amount or structure (e.g., level) of the polypeptide in the sample, which may then be compared to similarly obtained levels of a mitochondrial polypeptide obtained from other samples.

[0108] In an effort to better understand the molecular details of mitochondrial dysfunction as a contributing factor in disease, a high-resolution map of the human mitochondrial proteome is disclosed herein using human heart tissue as the source of isolated mitochondria, which are further enriched on metrizamide density gradients, solubilized and fractionated using sucrose density gradients. Although a protein map was previously generated using an only partially enriched mitochondrial fraction from human placenta (Rabilloud et al., 1998 Electrophor. 19:1006), no reliable database cataloguing mitochondrial proteins is currently available (cf., e.g., Koc et al., 2000 J. Biol. Chem. 275:32585; Lopez et al., 2000 Electrophor. 21:3427). Typically, mitochondria may be obtained from brain, heart, skeletal muscle or liver, where they are most abundant, although other sources (e.g., blood platelets) may also be used. According to the present invention there is provided a framework for investigating mitochondrial proteins, including identifying previously unrecognized mitochondrial proteins (e.g., novel proteins or known proteins not previously known to exist as mitochondrial molecular components) as well as those that are modified as provided herein as a correlate of disease, by mapping the human heart mitochondrial proteome. As described in greater detail in the Examples, mitochondrial proteins in distinct sucrose density gradient fractions were separated by one-dimensional polyacrylamide gel electrophoresis, and isolated proteins recovered from gels were analyzed as described below using matrix assisted laser desorption ionization (MALDI) and MALDI-post source decay (MALDI-PSD) techniques. (For other MS methods for proteins, see, e.g., Godovac-Zimmermann et al., 2001 Mass Spectromet. Rev. 20:1-57; Nilsson et al., 2000 Mass Spectromet. Rev. 19:390-397.) Over 1400 proteins were identified in the NCBI (http://www.ncbi.nim.nih.gov/Entrez/) and GenPept (http://www.ncbi.nlm.nih.gov/Entrez/protein.html) databases. Alternative databases for identifying protein sequences are known to the art and include, for example, Swissprot (http://www.expasy.ch/sprot/sprot-top.html), and owl (http://www.biochem.ucl.ac.uk/bsm/dbbrowser/OWL/OWL.html.) The data set so obtained provides for the identification of proteins present in mitochondria from human heart, a bioenergetically active tissue.

[0109] As described in greater detail below, the present invention is also directed in pertinent part to the use of mass spectrometry (MS), and in particular to the use of matrix assisted laser desorption ionization time-of-flight (MALDI-TOF) mass spectrometry, for the analysis of mitochondrial proteins and peptides obtained from a subject or biological source as provided herein.

[0110] In particularly preferred embodiments of the present invention, all or a portion of a protein fraction derived from a biological sample as provided herein may be contacted with one or more proteolytic agents under conditions and for a time sufficient to generate a plurality of peptide fragments derived from the protein fraction. Peptide fragments are typically continuous portions of a polypeptide chain derived from a protein of the protein fraction, which portions may be up to about 100 amino acids in length, preferably up to about 50 amino acids in length, more preferably up to about 30 amino acids in length, and still more preferably up to about 15-20 amino acids in length. In particularly preferred embodiments peptide fragments are 10-15 amino acids in length, and in other preferred embodiments peptide fragments may be 2-12 amino acids long.

[0111] A variety of proteolytic agents and suitable conditions for using them are known in the art, any of which may be useful according to certain embodiments of the present invention wherein peptide fragments are generated. Particularly preferred are proteolytic agents that are proteolytic enzymes or proteases, for example trypsin, Glu-C protease (Staphylococcal V8 protease), Lys-C protease, Arg-C protease, or other proteases known in the art to cleave peptides at specific amino acid linkages, typically at a relatively limited number of cleavage sites within a protein or polypeptide. Other useful proteolytic agents that are proteolytic enzymes include serine proteases, for example, chymotrypsin, elastase and trypsin; thiolproteases, such as papain or yeast proteinase B; acid proteases, including, e.g., pepsin or cathepsin D; metalloproteinases (e.g., collagenases, microbial neutral proteinases); carboxypeptidases; N-terminal peptidases or any other proteolytic enzymes that those having ordinary skill in the art will recognize may be employed to generate peptide fragments as provided herein (see, e.g., Bell, J. E. and Bell, E. T., Proteins and Enzymes, 1988 Prentice-Hall, Englewood Cliffs, N.J.; Worthington Enzyme Manual, V. Worthington, ed., 1993 Worthington Biochemical Corp., Freehold, N.J.).

[0112] Alternatively, in certain embodiments it may be desirable to use proteolytic agents that are chemical agents, for example HCl, CNBr, formic acid, N-bromosuccinimide, BNPS-skatole, o-iodosobenzoic acid/p-cresol, Cyssor, 2-nitro-5-thiocyanobenzoic acid, hydroxylamine, pyridine/acetic acid or other chemical cleavage procedures (see, e.g., Bell and Bell, 1988, and references cited therein).

[0113] As noted above, oxidative damage to proteins, such as protein modification that results from reactive free radical activity in biological systems, is an underlying feature in the pathogenesis of a number of diseases. Accordingly, a disease associated with altered mitochondrial function, for example a disease associated with altered mitochondrial constitution or composition (e.g., a disorder or condition characterized by statistically significant alterations in the quantity, structure and/or activity of one or more mitochondrial molecular components as provided herein) may also include a “disease associated with oxidative modification of a protein”, such as any disease in which at least one protein or peptide is oxidatively (e.g., covalently) and, in most cases, inappropriately modified. In highly preferred embodiments, at least one protein or peptide in a subject or biological source having a disease associated with oxidative modification of a protein includes a mitochondrial protein that has undergone disease-associated oxidative damage. Thus, such a disease may have a basis in a respiratory or metabolic or other defect, whether mitochondrial or extramitochondrial in origin. Diseases associated with oxidative modification of proteins may include Alzheimer's disease (AD), diabetes mellitus, Parkinson's disease, amyotrophic lateral sclerosis (ALS), atherosclerosis and other degenerative and inflammatory diseases. Those familiar with the art will be aware of clinical criteria for diagnosing certain of these diseases, which diagnostic criteria are augmented in view of the subject invention methods and compositions.

[0114] As described in greater detail in the Examples, certain embodiments of the invention contemplate the unexpected discovery that a mitochondrial protein or peptide containing tryptophan may be oxidatively modified to yield proteins or peptides containing this modified amino acid, although the invention is not intended to be so limited and as described herein contemplates mitochondrial proteins and peptides comprising a wide variety of other amino acids that may be oxidatively modified, according to oxidation reactions such as those described, for example, in Halliwell and Gutteridge (Free Radicals in Biology and Medicine, 1989 Clarendon Press, Oxford, UK). As described below, a number of mitochondrial proteins have been identified in which at least one tryptophan residue was doubly oxidized, thereby undergoing conversion to N-formylkynurenine. Accordingly, in certain embodiments the invention contemplates determination of a modified polypeptide (e.g., SEQ ID NOS:1-3025) comprising an oxidative modification that may, in certain further embodiments comprise an oxidized trytophan residue, which may in certain still further comprise N-formylkynurenine. Identification and determination of oxidative modification of tryptophan in proteins and peptides are well known to those familiar with the art (e.g., Halliwell and Gutteridge, pages 93-97; 315-320; 413-429).

[0115] For instance, the oxidation of tryptophan to N-formylkynurenine in proteins has been known for over 35 years since Previero et al. described it in hen's egg-white lysozyme in anhydrous formic acid (1967 J. Mol. Biol. 24:261). Kuroda et al. (1975 J. Biochem. (Tokyo) 78:641) subsequently found inactivation of lysozyme by ozone in aqueous solution occurred only when one critical tryptophan residue was oxidized, thus providing the first evidence that oxidation of a specific tryptophan residue can impair enzyme function. These early reports relied on identification of the tryptophan oxidation products by characteristic electronic absorption spectra. Finley et al. (1998 Protein Sci. 7:2391) exposed α-crystallin from bovine lens tissue to Fenton chemistry in vitro and separated the component tryptic peptides by HPLC. Tandem MS/MS spectrometry was used to identify oxidized amino acid sites by +16, +32 and +4 u increases in the molecular mass of peptide fragment ions containing tryptophan residues. Structures corresponding to those mass shifts are shown in FIG. 3. More recently Thiede et al. (2000 Rapid Commun. Mass Spectrom. 14:496) described oxidatively modified tryptophan residues in peptides from human Jurkat T lymphoblastoid cells. These workers described oxidatively modified tryptophan in a peptide which, as shown by the Examples provided herein, shares structure with a similar peptide derived from the mitochondrial voltage dependent anion channel-1 (VDAC1, e.g., SEQ ID NO:2559) polypeptide (see Table 3, KLETAVNLAWTAGNSNTR). Certain embodiments of the present invention therefore contemplate expressly excluding determination of the peptide KLETAVNLAWTAGNSNTR which comprises oxidatively modified tryptophan, certain other embodiments contemplate expressly excluding an oxidatively modified VDAC1 polypeptide, and certain other embodiments of the present invention therefore contemplate expressly excluding a disease associated with altered mitochondrial function that is T-cell lymphoma or leukemia.

[0116] In order to determine whether a mitochondrial component may contribute to a particular disease associated with oxidative modification of a protein, it may be useful to construct a model system for diagnostic tests and for screening candidate therapeutic agents in which the nuclear genetic background may be held constant while the mitochondrial genome is modified. It is known in the art to deplete mitochondrial DNA from cultured cells to produce η⁰ cells, thereby preventing expression and replication of mitochondrial genes and inactivating mitochondrial function. It is further known in the art to repopulate such η⁰ cells with mitochondria derived from foreign cells in order to assess the contribution of the donor mitochondrial genotype to the respiratory phenotype of the recipient cells. Such cytoplasmic hybrid cells, containing genomic and mitochondrial DNAs of differing biological origins, are known as cybrids. See, for example, International Publication Number WO 95/26973 and U.S. Pat. No. 5,888,498 which are hereby incorporated by reference in their entireties, and references cited therein.

[0117] According to the present invention, a level of at least one mitochondrial protein or peptide is determined in a biological sample from a subject or biological source. For subjects that are asymptomatic, that exhibit a pre-disease phenotype or that meet clinical criteria for having or being at risk for having a particular disease, such determination may have prognostic and/or diagnostic usefulness. For example, where other clinical indicators of a given disease are known, levels of at least one mitochondrial protein or peptide in subjects known to be free of a risk or presence of such disease based on the absence of these indicators may be determined to establish a control range for such level(s). The levels may also be determined in biological samples obtained from subjects suspected of having or being at risk for having the disease, and compared to the control range determined in disease free subjects. Those having familiarity with the art will appreciate that there may be any number of variations on the particular subjects, biological sources and bases for comparing levels of at least one mitochondrial protein or peptide that are useful. beyond those that are expressly presented herein, and these additional uses are within the scope and spirit of the invention.

[0118] For instance, determination of levels of at least one mitochondrial protein or peptide may take the form of a prognostic or a diagnostic assay performed on a skeletal muscle biopsy, on whole blood collected from a subject by routine venous blood draw, on buffy coat cells prepared from blood or on biological samples that are other cells, organs or tissue from a subject. Alternatively, in certain situations it may be desirable to construct cybrid cell lines using mitochondria from either control subjects or subjects suspected of being at risk for a particular disease associated with oxidative modification of proteins. Such cybrids may be used to determine levels of at least one mitochondrial peptide or protein for diagnostic or predictive purposes, or as biological sources for screening assays to identify agents that may be suitable for treating the disease based on their ability to alter (e.g., to increase or decrease in a statistically significant manner) the levels of at least one mitochondrial protein or peptide in treated cells.

[0119] In one embodiment of this aspect of the invention, therapeutic agents or combinations of agents that are tailored to effectively treat an individual patient's particular disease may be identified by routine screening of candidate agents on cybrid cells constructed with the patient's mitochondria. In another embodiment, a method for identifying subtypes of the particular disease is provided, for example, based on differential effects of individual candidate agents on cybrid cells constructed using mitochondria from different subjects diagnosed with the same disease.

[0120] MALDI

[0121] As noted above, in certain preferred embodiments of the present invention there is provided a method for identifying at least one mitochondrial protein comprising generating a mass spectrum of a mitochondrial polypeptide-derived peptide fragment, wherein the mass spectrum is preferably generated using MALDI-TOF. By way of background, in 1987, matrix-assisted laser desorption/ionization mass spectrometry (MALDI) was introduced by Hillenkamp and Karas, and since has become a very powerful bioanalytical tool (Anal. Chem. 60:2288-2301,1988; see also Burlingame et al., Anal. Chem. 68:599-651, 1996 and references cited therein). The success of MALDI in the area of protein science can be attributed to several factors. The greatest of these is that MALDI can be rapidly (˜5 minutes) applied as an analytical technique to analyze small quantities of virtually any protein (practical sensitivities of ˜1 pmole protein loaded into the mass spectrometer). The technique is also extremely accurate. Beavis and Chait demonstrated that the molecular weights of peptides and proteins can be determined to within ˜0.01% by using methods in which internal mass calibrants (x-axis calibration) are introduced into the analysis (Anal. Chem. 62:1836-40, 1990). MALDI can also be made quantitative using a similar method in which internal reference standards are introduced into the analysis for ion signal normalization (y-axis calibration). Quantitative determination of proteins and peptides is possible using this approach with accuracies on the order of ˜10% (Nelson et al., Anal. Chem. 66:1408-15, 1994). Finally, MALDI is extremely tolerant of large molar excesses of buffer salts and, more importantly, the presence of other proteins.

[0122] With the high tolerance towards buffer salts and other biomolecular components comes the ability to directly analyze complex biological mixtures. Many examples exist where MALDI is used to directly analyze the results of proteolytic or chemical digestion of polypeptides (see Burlingame et al., supra). Other examples extend to elucidating post-translational modifications (namely carbohydrate type and content), a process requiring the simultaneous analysis of components present in a heterogeneous glycoprotein mixture (Sutton et al., Techniques in Protein Chemistry III, Angeletti, Ed., Academic Press, Inc., New York, pp.109-116,1993). Arguably, the most impressive use of direct mixture analysis is the screening of natural biological fluids. In that application, proteins are identified, as prepared directly from the host fluid, by detection at precise and characteristic mass-to-charge (m/z) values (Tempst et al., Mass Spectrometry in the Biological Sciences, Burlingame and Carr, Ed., Humana Press, Totowa, N.J., p.105, 1996).

[0123] The use of an affinity ligand-derivatized support to selectively retrieve a target analyte specifically for MALDI analysis was first demonstrated by Hutchens and Yip (Rapid Commun. Mass Spectrom. 7:576-80, 1993). Those investigators used single-stranded DNA-derivatized agarose beads to selectively retrieve a protein, lactoferrin, from pre-term infant urine by incubating the beads with urine. The agarose beads were then treated as the MALDI analyte—a process involving mixing with a solution-phase MALDI matrix followed by deposition of the mixture on a mass spectrometer probe. MALDI then proceeded in the usual manner. Results indicated that the derivatized beads selectively retrieved and concentrated the lactoferrin; enough so to enable ion signal in the MALDI mass spectrum adequate to unambiguously identify the analyte at the appropriate m/z value (81,000 Da). A number of variations on this approach have since been reported. These include the use of immunoaffinity precipitation for the MALDI analysis of transferrins in serum (Nakanishi et al., Biol. Mass Spectrom. 23:230-33,1994), screening of ascites for the production of monoclonal antibodies (Papac et al., Anal. Chem. 66:2609-13, 1994), and the identification of linear epitope regions within an antigen (Zhao et al., Anal. Chem. 66:3723-26,1994). Even more recently, the affinity capture approaches have been made rigorously quantitative by incorporating mass-shifted variants of the analyte into the analysis (Nelson et al. Anal. Chem. 67:1153-58,1995). The variants are retained throughout the analysis (in the same manner as the true analyte) and observed as unique (resolved) signals in the MALDI mass spectrum. Quantification of the analyte is performed by equating the relative ion signals of the analyte and variant to an analyte concentration.

[0124] Suitable mass spectrometers include, but are not limited to, a magnetic sector mass spectrometer, a Fourier transform ion cyclotron resonance (FTICR) mass spectrometer, a quadrupole (rods or ion trap) mass spectrometer and a time-of-flight (TOF) mass spectrometer, and/or various hybrid instruments comprising combinations of any two or more of such types of mass analyzer (e.g., quadrupole/orthogonal TOF, Qq/TOF, TOF/TOF, etc.). In a preferred embodiment, the mass spectrometer is a time TOF mass spectrometer.

[0125] Since large molecules, such as peptides and proteins, are generally too large to be desorbed/ionized intact, a matrix is used to assist laser desorption/ionization of the same. This technique is referred to as matrix assisted laser desorption/ionization or (MALDI), and the matrix agent is referred to as a “MALDI matrix.” In short, the analyte is contacted with a suitable MALDI matrix and allowed to crystallize. Suitable MALDI matrix materials are known to those skilled in this field, and include, for example, derivatives of cinnamic acid such as α-cyano-4-hydroxycinnamic acid (ACCA) and sinapinic acid (SA).

[0126] A first criterion to performing mass spectrometry on the analyte captured by the interactive surface is the generation of vapor-phase ions. In the practice of this invention, such species are generated by desorption/ionization techniques. Suitable techniques include desorption/ionization methods derived from impact of particles with the sample. These methods include fast atom bombardment (FAB—impact of neutrals with a sample suspended in a volatile matrix), secondary ion mass spectrometry (SIMS—impact of keV primary ions generating secondary ions from a surface), liquid SIMS (LSIMS—like FAB except the primary species is an ion), plasma desorption mass spectrometry (like SIMS except using MeV primary ions), massive cluster impact (MCI—like SIMS using large cluster primary ions), laser desorption/ionization (LDI—laser light is used to desorb/ionize species from a surface), and matrix-assisted laser desorption/ionization (MALDI—like LDI except the species are desorbed/ionized from a matrix capable of assisting in the desorption and ionization events). Any of the aforementioned desorption/ionization techniques may be employed in the practice of the present invention. In a preferred embodiment, LDI is employed, and in a more preferred embodiment, MALDI is utilized. For matrix assisted laser desorption ionization/time of flight (MALDI-TOF) analysis or other MS (mass spectrometry) techniques known to those skilled in the art, see, for example, U.S. Pat. Nos. 5,622,824, 5,605,798 and 5,547,835. Alternatively, other soft-ionization mechanisms that are not based on particle bombardment but that are also capable of ionizing peptides and/or proteins could be employed. Such methods include electrospray ionization (ESI, liquid flow containing analyte sprayed from a nozzle or needle at high voltage) or atmospheric pressure ionzation (API).

[0127] Screening Assays and Agents

[0128] In certain embodiments, the present invention provides a method of identifying an agent for treating a disease associated with altered mitochondrial function, comprising (a) contacting a candidate agent with a biological sample from a subject having a disease associated with altered mitochondrial function, wherein the sample comprises at least one polypeptide that exhibits altered biological activity which accompanies the disease and wherein the polypeptide is (i) a polypeptide having an amino acid sequence as set forth in any one of SEQ ID NOS 1-3025, or (ii) a modified polypeptide that comprises at least one modification to a polypeptide having an amino acid sequence as set forth in any one of SEQ ID NOS 1-3025; and (b) determining an increase or decrease in the altered biological activity of the polypeptide in the presence of the candidate agent relative to the level-of the altered biological activity in the absence of the candidate agent, and therefrom identifying an agent for treating a disease associated with altered mitochondrial function.

[0129] Candidate agents for use in these and related methods of screening for a modulator of mitochondrial protein or peptide according to the present invention may be provided as “libraries” or collections of compounds, compositions or molecules. Such molecules typically include compounds known in the art as “small molecules” and having molecular weights less than 10⁵ daltons, preferably less than 10⁴ daltons and still more preferably less than 10³ daltons. For example, members of a library of test compounds can be administered to a plurality of samples, and then assayed for their ability to increase or decrease the level of at least one indicator of altered mitochondrial function.

[0130] Candidate agents further may be provided as members of a combinatorial library, which preferably includes synthetic agents prepared according to a plurality of predetermined chemical reactions performed in a plurality of reaction vessels. For example, various starting compounds may be prepared employing one or more of solid-phase synthesis, recorded random mix methodologies and recorded reaction split techniques that permit a given constituent to traceably undergo a plurality of permutations and/or combinations of reaction conditions. The resulting products comprise a library that can be screened followed by iterative selection and synthesis procedures, such as a synthetic combinatorial library of peptides (see e.g., PCT/US91/08694, PCT/US91/04666, which are hereby incorporated by reference in their entireties) or other compositions that may include small molecules as provided herein (see e.g., PCT/US94/08542, EP 0774464, U.S. Pat. No. 5,798,035, U.S. Pat. No. 5,789,172, U.S. Pat. No. 5,751,629, which are hereby incorporated by reference in their entireties). Those having ordinary skill in the art will appreciate that a diverse assortment of such libraries may be prepared according to established procedures, and tested for their influence on an indicator of altered mitochondrial function, according to the present disclosure.

[0131] The present invention provides compositions and methods that are useful in pharmacogenomics, for the classification and/or stratification of a subject or patient population. In one embodiment, for example, such stratification may be achieved by identification in a subject or patient population of one or more distinct profiles of at least one mitochondrial protein or peptide that is modified (e.g., an altered expression level, altered amino acid sequence, altered posttranslational modification or an oxidative modification) or in which the biological activity is altered and that correlates with a particular disease associated with altered mitochondrial function. Such profiles may define parameters indicative of a subject's predisposition to develop the particular disease, and may further be useful in the identification of novel subtypes of that disease. In another embodiment, correlation of one or more traits in a subject with at least one mitochondrial protein or peptide (e.g., expression levels of a mitochondrial protein that can be determined to differ from a control in a statistically significant manner) may be used to gauge the subject's responsiveness to, or the efficacy of, a particular therapeutic treatment. Similarly, where levels of at least one indicator mitochondrial protein or peptide and risk for a particular disease associated with altered mitochondrial function are correlated, the present invention provides advantageous methods for identifying agents suitable for treating such disease(s), where such agents affect levels of at least one mitochondrial protein or peptide (or levels of a modification) in a biological source. Such suitable agents will be those that alter (e.g., increase or decrease) the level of at least one mitochondrial protein or peptide in a statistically significant manner. In certain preferred embodiments, a suitable agent alters a mitochondrial protein or peptide level in a manner that confers a clinical benefit, and in certain other, non-exclusive preferred embodiments, a suitable agent alters a mitochondrial protein or peptide level by causing it to return to a level detected in control or normal (e.g., disease-free) subjects.

[0132] As described herein, determination of levels of at least one mitochondrial protein or peptide may also be used to stratify a patient population (i.e., a population classified as having one or more diseases associated with altered mitochondrial function, for example, by oxidative modification of a protein). Accordingly, in another preferred embodiment of the invention, determination of levels of a mitochondrial protein or peptide in at least one protein or peptide in a biological sample from an oxidatively stressed subject may provide a useful correlative indicator for that subject. A subject so classified on the basis of mitochondrial protein expression levels may be monitored using any known clinical parameters for a specific disease referred to above, such that correlation between levels of at least one mitochondrial protein or peptide and any particular clinical score used to evaluate a particular disease may be monitored. For example, stratification of an AD patient population according to levels of at least one mitochondrial protein or peptide may provide a useful marker with which to correlate the efficacy of any candidate therapeutic agent being used in AD subjects.

[0133] In certain other embodiments, the invention provides a method of treating a patient having a disease associated with altered mitochondrial function by administering to the patient an agent that that compensates for at least one biological activity of a polypeptide that exhibits altered biological activity which accompanies the disease, wherein the polypeptide is (i) a polypeptide having an amino acid sequence as set forth in any one of SEQ ID NOS 1-3025, or (ii) a modified polypeptide that comprises at least one modification to a polypeptide having an amino acid sequence as set forth in any one of SEQ ID NOS 1-3025. As known to the art, an agent that “compensates” for an altered biological activity of a polypeptide includes an agent that counterbalances any structural or functional defect or alteration in such polypeptide, such as an altered biological activity arising as the result of a modification as provided herein, where such counterbalancing may be partial or full restoration of normal activity, or restoration to supranormal levels, so long as an effect is demonstrable in a statistically significant manner. In certain preferred embodiments the agent substantially restores at least one mitochondrial protein or peptide to a level found in control or normal subjects (which in some cases may be an undetectable level). In a most preferred embodiment, an agent that substantially restores (e.g., increases or decreases) at least one mitochondrial protein or peptide to a normal level effects the return of the level of that indicator to a level found in control subjects. In another preferred embodiment, the agent that substantially restores such an indicator confers a clinically beneficial effect on the subject. In another embodiment, the agent that substantially restores the indicator promotes a statistically significant change in the level of at least one mitochondrial protein or peptide. As noted herein, those having ordinary skill in the art can readily determine whether a change in the level of a particular mitochondrial protein or peptide brings that level closer to a normal value and/or clinically benefits the subject, based on the present disclosure. Thus, an agent that substantially restores at least one mitochondrial protein or peptide to a normal level may include an agent capable of fully or partially restoring such level. These and related advantages will be appreciated by those familiar with the art.

[0134] Any of the agents for treating a disease associated with altered mitochondrial function (e.g., oxidative modification of a protein), identified as described herein, are preferably part of a pharmaceutical composition when used in the methods of the present invention. The pharmaceutical composition will include at least one of a pharmaceutically acceptable carrier, diluent or excipient, in addition to one or more agents for treating a disease associated with oxidative modification of a protein, and, optionally, other components.

[0135] “Pharmaceutically acceptable carriers” for therapeutic use are well known in the pharmaceutical art, and are described, for example, in Remingtons Pharmaceutical Sciences, Mack Publishing Co. (A. R. Gennaro edit. 1985). For example, sterile saline and phosphate-buffered saline at physiological pH may be used. Preservatives, stabilizers, dyes and even flavoring agents may be provided in the pharmaceutical composition. For example, sodium benzoate, sorbic acid and esters of p-hydroxybenzoic acid may be added as preservatives. Id. at 1449. In addition, antioxidants and suspending agents may be used. Id.

[0136] “Pharmaceutically acceptable salt” refers to salts of the compounds of the present invention derived from the combination of such compounds and an organic or inorganic acid (acid addition salts) or an organic or inorganic base (base addition salts). The compounds of the present invention may be used in either the free base or salt forms, with both forms being considered as being within the scope of the present invention.

[0137] The pharmaceutical compositions that contain one or more agents for treating a disease associated with oxidative modification of a protein may be in any form which allows for the composition to be administered to a patient. For example, the composition may be in the form of a solid, liquid or gas (aerosol). Typical routes of administration include, without limitation, oral, topical, parenteral (e.g., sublingually or buccally), sublingual, rectal, vaginal, intrathecal and intranasal. The term parenteral as used herein includes subcutaneous injections, intravenous, intramuscular, intrasternal, intracavernous, intrameatal, intraurethral injection or infusion techniques. The pharmaceutical composition is formulated so as to allow the active ingredients contained therein to be bioavailable upon administration of the composition to a patient. Compositions that will be administered to a patient take the form of one or more dosage units, where for example, a tablet may be a single dosage unit, and a container of one or more compounds of the invention in aerosol form may hold a plurality of dosage units.

[0138] For oral administration, an excipient and/or binder may be present. Examples are sucrose, kaolin, glycerin, starch dextrins, sodium alginate, carboxymethylcellulose and ethyl cellulose. Coloring and/or flavoring agents may be present. A coating shell may be employed.

[0139] The composition may be in the form of a liquid, e.g., an elixir, syrup, solution, emulsion or suspension. The liquid may be for oral administration or for delivery by injection, as two examples. When intended for oral administration, preferred compositions contain, in addition to one or more agents for treating a disease associated with oxidative modification of a protein, one or more of a sweetening agent, preservatives, dye/colorant and flavor enhancer. In a composition intended to be administered by injection, one or more of a surfactant, preservative, wetting agent, dispersing agent, suspending agent, buffer, stabilizer and isotonic agent may be included.

[0140] A liquid pharmaceutical composition as used herein, whether in the form of a solution, suspension or other like form, may include one or more of the following adjuvants: sterile diluents such as water for injection, saline solution, preferably physiological saline, Ringer's solution, isotonic sodium chloride, fixed oils such as synthetic mono or digylcerides which may serve as the solvent or suspending medium, polyethylene glycols, glycerin, propylene glycol or other solvents; antibacterial agents such as benzyl alcohol or methyl paraben; antioxidants such as ascorbic acid or sodium bisulfite; chelating agents such as ethylenediaminetetraacetic acid; buffers such as acetates, citrates or phosphates and agents for the adjustment of tonicity such as sodium chloride or dextrose. The parenteral preparation can be enclosed in ampoules, disposable syringes or multiple dose vials made of glass or plastic Physiological saline is a preferred adjuvant. An injectable pharmaceutical composition is preferably sterile.

[0141] A liquid composition intended for either parenteral or oral administration should contain an amount of agent(s) for treating a disease associated with oxidative modification of a protein such that a suitable dosage will be obtained. Typically, this amount is at least 0.01 wt % of an agent for treating a disease associated with oxidative modification of a protein in the composition. When intended for oral administration, this amount may be varied to be between 0.1 and about 70% of the weight of the composition. Preferred oral compositions contain between about 4% and about 50% of the agent for treating a disease associated with oxidative modification of a protein. Preferred compositions and preparations are prepared so that a parenteral dosage unit contains between 0.01 to 1% by weight of active compound.

[0142] The pharmaceutical composition may be intended for topical administration, in which case the carrier may suitably comprise a solution, emulsion, ointment or gel base. The base, for example, may comprise one or more of the following: petrolatum, lanolin, polyethylene glycols, beeswax, mineral oil, diluents such as water and alcohol, and emulsifiers and stabilizers. Thickening agents may be present in a pharmaceutical composition for topical administration. If intended for transdermal administration, the composition may include a transdermal patch or iontophoresis device. Topical formulations may contain a concentration of the agent(s) for treating a disease associated with oxidative modification of a protein of from about 0.1 to about 10% w/v (weight per unit volume).

[0143] The composition may be intended for rectal administration, in the form, e.g., of a suppository which will melt in the rectum and release the drug. The composition for rectal administration may contain an oleaginous base as a suitable nonirritating excipient. Such bases include, without limitation, lanolin, cocoa butter and polyethylene glycol.

[0144] In the methods of the invention, the agent(s) for treating a disease associated with oxidative modification of a protein may be administered through use of insert(s), bead(s), timed-release formulation(s), patch(es) or fast-release formulation(s).

[0145] It will be evident to those of ordinary skill in the art that the optimal dosage of the agent(s) for treating a disease associated with oxidative modification of a protein may depend on the weight and physical condition of the patient; on the severity and longevity of the physical condition being treated; on the particular form of the active ingredient, the manner of administration and the composition employed. It is to be understood that use of an agent for treating a disease associated with oxidative modification of a protein in a chemotherapy can involve such a compound being bound to an agent, for example, a monoclonal or polyclonal antibody, a protein or a liposome, which assist the delivery of said compound.

[0146] These and related advantages will be appreciated by those familiar with the art. The following Examples are offered by way of illustration and not limitation.

### EXAMPLES

### Example 1

### PREPARATION OF HUMAN HEART MITOCHONDRIA

[0147] Human heart mitochondria were obtained from Analytical Biological Services (Wilmington, Del.) and were further purified by metrizamide gradient centrifugation (see, e.g., Rosenthal, R. E., et al., 1987, J. Cereb. Blood Flow Metab. 7:752-8). Mitochondria (40 mg) were resuspended in MSHE (210 mM mannitol, 70 mM sucrose, 5 mM Hepes, 1 mM EGTA plus a Complete protease inhibitor cocktail tablet (Roche, Indianapolis, Ind.)) and loaded onto a 35%/17% metrizamide gradient in 6% Percoll. Gradients were centrifuged for 45 min at 19000 rpm, 4° C. in a SW40 rotor. The heavy mitochondrial fraction was collected from the 35/17% interface, diluted in MSHE before pelleting at 12000 g for 10 min, and resuspended in MSHE. Protein concentrations were determined using the BioRad DC protein assay (BioRad Laboratories, Hercules, Calif.). The purity of the mitochondria was assessed by Western analysis using antisera directed against actin (Abcam, Cambridge, UK), dynamin II (Transduction Labs, Lexington, Ky.), KDEL, and LAMP1 (Stressgen, Victoria, BC Canada) to detect contamination due to cytoplasm, plasma membrane, ER, and lysosomes, respectively. The integrity of the mitochondria was assessed by Western analysis using a cocktail of antibodies directed against components of the electron transport chain; NDUFS2, 70 kD subunit of complex II, core I of complex III, cox 4, and ATP synthase alpha; all from Molecular Probes (Eugene, Oreg.). A representative example of western immunoblot analysis of mitochondrial fractions prepared essentially as described here is shown in FIG. 1.

### Example 2

### SUCROSE DENSITY GRADIENT FRACTIONATION OF SOLUBILIZED MITOCHONDRIA

[0148] Metrizamide purified mitochondria (13 mg) were resuspended in MSHE plus protease inhibitors and solubilized with 1% lauryl maltoside for 25 min on ice with frequent vortexing. Samples were centrifuged at 14000 rpm, 4° C. for 20 min. The pellet was frozen by immersion in liquid nitrogen and stored at −80° C. The supernatant was subjected to sucrose gradient centrifugation (Hanson, B. J. et al., 2001, Electrophoresis 22:950-959). The gradient consisted of 1 mL step-fractions of 35, 32.5, 30, 27.5, 25, 22.5, 20, 17.5, 15 and 10% sucrose in 10 mM Tris, pH 7.5/1 mM EDTA/0.05% lauryl maltoside, plus protease inhibitors). The solubilized mitochondria were loaded onto the gradient in 5% sucrose and centrifuged at 38000 rpm, 4° C. for 16.5 h in a SW40 rotor. The gradient was collected from the bottom in 1 mL fractions. The gradient fractions were concentrated in Microcon YM-3 centrifugal concentrators (Millipore, Bedford, Mass.). The concentrated samples were quantitated using the BioRad DC protein reagent, snap frozen by immersion in liquid nitrogen and stored at −80° C. Separation of proteins across the gradient was initially assessed by subjecting 1 □L aliquots of the concentrated fractions to electrophoresis on precast 4-12% NuPAGE gels in Mes buffer (Invitrogen, Carlsbad, Calif.) followed by staining with SimplyBlue Safe Stain (Invitrogen) or Western analysis using the cocktail of antibodies directed against components of the electron transport chain. Quantification of the electron transport chain complexes across the gradient was performed on images captured on a Fluor-S Multilmager (BioRad, Hercules, Calif.) and analyzed using QuantityOne software (BioRad).

[0149] Immediately prior to processing and analysis by mass spectrometry (see below), the concentrated gradient fractions and the solubilized pellet were successively subjected to electrophoresis on NuPAGE gels using ultraclean reagents. Buffers were made using HPLC grade water, and a gel rig and staining box were set aside for these samples. Aliquots (25 μg) of each concentrated gradient fraction were loaded on a 4-12% NuPage gel and run at 25 mA for 1 h, then 35 mA for another 1 h 20 min. Gels were fixed for 10 min (40% methanol, 10% acetic acid), washed three times for 5 min in HPLC grade water, stained with colloidal Coomassie for 10-15 sec, and then partially destained in water.

### Example 3

### GEL PROCESSING AND MASS SPECTROMETRIC ANALYSIS OF POLYPEPTIDES

[0150] The lightly Coomassie-stained electrophoretic gels from Example 2 were imaged placed on a light box in a laminar flow hood on a plastic cutting mat with a 65×1 mm grid placed underneath. To avoid keratin contamination all manipulations were performed wearing latex gloves, shower caps and lab coats. Starting at the bottom the gel, approximately 1 mm slices were excised across the entire width of a gel lane with a clean razor, further cut into approximately 1 mm cubes and transferred to 500 μL microcentrifuge tubes that had been prewashed with 50:50 water:acetonitrile. This procedure was progressively continued to the top the gel to ensure comprehensive coverage of all proteins in the gel lane. Although most gel slices were 1 mm thick, when discrete bands were encountered they were selectively excised, while near the top of the gel slightly thicker slices were taken where the protein concentration was lower. This resulted in 50-64 slices for each of the 12 lanes processed (corresponding to sucrose fractions 1-10, combined 11/12 and the pellet).

[0151] The gel pieces were incubated with 200 μL destain solution (25 mM ammonium bicarbonate, 25% acetonitrile) at 37° C. for 45 min. The destain solution was decanted and another cycle of destaining performed if there was residual coloration. The gel pieces were then dried on a Genevac concentrator using the “cool heat” setting (about 30 min). The dried gel pieces were slightly moistened with 5 μL 50 mM ammonium bicarbonate, 5% acetonitrile and 5 μL of freshly prepared ice cold Promega modified trypsin (0.1 mg/mL in 50 mM ammonium bicarbonate, 5% acetonitrile) added. The gel pieces were allowed to soak up the trypsin solution for 10 min, and then were fully reswelled with a 65 μL aliquot of 50 mM ammonium bicarbonate, 5% acetonitrile. After an overnight incubation at 37° C., the digestion was terminated by addition of 7.5 μL 10% acetic acid followed by brief vortexing and light centrifugation in a microcentrifuge. The digest supernatants were subsequently transferred to secondary prewashed 500 μL microcentrifuge tubes and carefully concentrated using the Genevac to final volumes of 10-20 μL. At no stage were the digests taken to dryness, in order to avoid irreversible adsorption of low abundance peptides to the walls of the tubes.

[0152] The concentrated digests were then carefully decanted to avoid particulates and transferred to the wells of a V-bottom 220 μL polypropylene microtiter 96 well plate. This plate was directly placed in a Symbiot (Applied Biosystems, Foster City, Calif.) robotic MALDI target spotter and 0.5 μL aliquots were spotted on a 2×96 well PS1 MALDI target along with a 0.3 μL aliquot of alpha-hydroxycinnamic acid matrix in 50% ACN, 0.1% TFA. Between each row of sample spots, calibrant (Des Arg1 Bradykinin, Mᵣ 904.4681; angiotensin 1, 1296.6853; Glul-Fibrinopeptide B, 1570.6774; Neurotensin, 1672.9175) was spotted for close external calibration between each successive MALDI spectrum.

[0153] MALDI spectra were acquired on a Voyager DE-STR under the following conditions: positive reflectron mode with delayed extraction, accelerating voltage 20 kV, grid voltage 65%, mirror voltage ratio 1.12, extraction delay time 125 nsec and low mass gate 500 Da. Spectral acquisition was automated using a spiral search pattern with saved spectra being the average of 3 successful acquisitions from 400 laser shots at 20 Hz repetition rate in the m/z 850-3000 range with a minimum intensity of 750 counts in the m/z 1000-3000 range. Peptide mass fingerprints were analyzed using the program Protein Prospector (Clauser, K. R. et al., 1999, Analytical Chemistry 71, 14:2871). Peaks from baseline corrected, noise filtered deisotoped spectra were filtered to remove autolytic trypsin and most keratin peaks and then subjected to two modes of analysis. The first involved tolerant matching of 4 or 5 peaks to proteins in the database within a 100 ppm window. In general, proteins matching with MOWSE scores (see Pappin, D. J. C. et al., 1993, Current Biology 3: 327-332 for an explanation of MOWSE scores) in excess of 10000 were considered hits. The second analysis involved using the program “intellical” (Applied Biosystems) which demands high precision. As a first pass, 25 proteins would be selected from the database with 3 matches with in 150 ppm mass accuracy. The program would then look for a uniform deviation between the observed and calculated peptide masses and recalibrate the spectrum against the best fits. In general, a protein was considered a hit that had 4 peptides matching within 15 ppm of the recalibrated spectrum and MOWSE scores over 1000 using these more rigorous parameters. These analyses were fully automated using PS1 software (Applied Biosystems). FIG. 2 shows a representative example of a MALDI mass spectrum generated from polypeptides derived from a single one-dimensional gel slice.

[0154] As well as these selection criteria, the relative intensity of the matching peaks and the molecular weight of the identified protein relative to the band from which it was excised were also taken into account. The remaining portions of the digests were subjected to automated LC/MS/MS analysis. The microtiter plate containing the remaining peptide digest mixture were transferred to an Endurance autosampler connected to a MicroTech Ultimate LC system. The digest (10 μL) was transferred to a capillary trapping column containing C18 reversed phase resin at 20 μL/min using a third pump containing solvent A (95% water, 5% acetonitrile, 0.5% acetic acid) and washed for 3 min. A gradient of solvent A to solvent B (80% acetonitrile, 20% water, 0.5% acetic acid) 20% to 80% over 40 min was used to elute peptides through a 4.5 cm 75 μC-18 packed Picofrit column (New Objectives Inc., Woburn, Mass.) at a flow rate of 200-500 nL/min directly into the heated capillary orifice of a Finnigan LCQ Ion Trap Mass spectrometer equipped with a Finnigan dynamic nanospray source (Thermo Finnigan, San Jose, Calif.).

[0155] Mass spectra were acquired in the m/z 400-2000 range under the following conditions: positive polarity, capillary temperature 148° C., source voltage 2.4 kV, source current 80 μA, capillary voltage 29 V and tube lens offset 0 V. After one full scan MS of the column effluent was recorded, two MS/MS spectra of the most intense and second most intense MS peaks were recorded over the m/z 100-2000 range with an isolation width of 2.5 and normalized collision energy 35. Dynamic exclusion was employed to select the maximum number of unique peptide peaks from the chromatograms. After replicate MS/MS spectra were acquired for a precursor ion, the m/z value of ion was placed on an exclusion list with a ±1.5 u window for 3 min. Each chromatogram was subsequently analyzed with the program SEQUEST (Ducret et al., 1998, Protein Sci. 7: 706-719). The minimum requirement for a hit were at least 2 peptides for a particular protein having an X_{corr}>1.7 for a +1 ion, X_{corr}>2 for a +2 ion or X_{corr}>3. In all cases Δ_{corr} must be greater than 0.1.

[0156] A set of 3025 polypeptides [SEQ ID NOS:1-3025] was identified in the GENBANK database on the basis of the above-described selection criteria for hits from the mitochondrial protein preparations recovered according to the procedures detailed above. Table 1 presents the numbers [SEQ ID NOS:1-3025] corresponding to the Sequence Listing submitted herewith for all 3025 polypeptides identified herein as mitochondrial components, along with the GENBANK accession numbers for these sequences and (if known) a brief description of each protein based on its sequence characteristics and database annotation. Additional polypeptides that were identified included those having amino acid sequences as set forth in NCBI/Genbank Acc. Nos. 35655 and 1421609, and reference herein to any one of SEQ ID NOS:1-3025 may according to certain embodiments be understood to include NCBI/Genbank Acc. Nos. 35655 and 142160.

TABLE 1
HUMAN HEART MITOCHONDRIAL PROTEINS

| SEQ ID | GENBANK | |
|---|---|---|
| NO: | ACC. NO. | DESCRIPTION OF MITOCHONDRIAL PROTEINS |
| 1 | 13013 | ND 4 |
| 2 | 28590 | reading frame HSA |
| 3 | 28714 | anion transport protein |
| 4 | 30102 | type I collagen |
| 5 | 31474 | follicle stimulating hormone receptor |
| 6 | 31645 | glyceraldehyde 3-phosphate dehydrogenase |
| 7 | 31746 | glutathione-insulin transhydrogenase (216 AA) |
| 8 | 34670 | hexokinase 1 |
| 9 | 34719 | myeloperoxidase |
| 10 | 72146 | vitronectin precursor - human |
| 11 | 72222 | heat shock protein 90-beta - human |
| 12 | 86754 | carrier ANT3 - human (fragment) |
| 13 | 87528 | dnaK-type molecular chaperone HSPA5 precursor - human |
| 14 | 88512 | protein-L-isoaspartate(D-aspartate) O-methyltransferase (EC 2.1.1.77) |
| | | splice form II - human |
| 15 | 88650 | succinate dehydrogenase (ubiquinone) (EC 1.3.5.1) 27K iron-sulfur |
| | | protein precursor, mitochondrial - human (fragment) |
| 16 | 88741 | T-cell receptor beta chain V region - human (fragment) |
| 17 | 88972 | undulin 1 |
| 18 | 105294 | alternative splicing factor ASF-2 |
| 19 | 105475 | myosin-binding protein C, skeletal muscle - human |
| 20 | 105595 | cell adhesion protein SQM1 |
| 21 | 106140 | glycophorin A |
| 22 | 106185 | GTP-binding protein Rab2 |
| 23 | 106906 | lipopolysaccharide-binding protein |
| 24 | 106970 | mcf2 protein |
| 25 | 107554 | pyruvate kinase isozyme M2 |
| 26 | 107631 | ryanodine receptor type 1, skeletal muscle - human |
| 27 | 107912 | transcription factor E3 |
| 28 | 113962 | annexin VI |
| 29 | 114312 | Sarcoplasmic/endoplasmic reticulum calcium ATPase 2 (Calcium pump 2) |
| | | (SERCA2) (SR Ca(2+)-ATPase 2) (Calcium-transporting ATPase |
| | | sarcoplasmic reticulum type, slow twitch skeletal muscle isoform) |
| | | (Endoplasmic reticulum class 1/2 Ca(2+) ATPase) |
| 30 | 114374 | Na, K-ATPase subunit alpha 1 |
| 31 | 114374 | Sodium/potassium-transporting ATPase alpha-1 chain precursor (Sodium |
| | | pump 1) (Na+/K+ ATPase 1) |
| 32 | 114549 | ATPase beta F1 |
| 33 | 115206 | C-1-TETRAHYDROFOLATE SYNTHASE, CYTOPLASMIC (C1-THF |
| | | SYNTHASE) |
| 34 | 117103 | cox 5b |
| 35 | 117759 | UCR 4 CYTOCHROME C1 |
| 36 | 117863 | UCR cyt b |
| 37 | 120643 | GLYCERALDEHYDE 3-PHOSPHATE DEHYDROGENASE, MUSCLE |
| 38 | 120749 | MAJOR GASTROINTESTINAL TUMOR-ASSOCIATED PROTEIN |
| | | GA733-2 |
| 39 | 121665 | Glutathione peroxidase 1 (GSHPx-1) (Cellular glutathione peroxidase) |
| 40 | 123277 | HOMEOBOX PROTEIN HOX-C6(HHO.C8) |
| 41 | 123571 | heat shock 27 KD protein |
| 42 | 123678 | heat shock 90 kD protein HSP 90-ALPHA (HSP 86) |
| 43 | 123678 | Heat shock protein HSP 90-alpha (HSP 86) |
| 44 | 125484 | HEPATOCYTE GROWTH FACTOR RECEPTOR PRECURSOR(C- |
| | | MET)(HGF-SF RECEPTOR) |
| 45 | 129070 | pyruvate dehydrogenase E 1-beta |
| 46 | 129379 | heat shock 60 kDa protein, mitochondrial precursor (Hsp60) (60 kDa |
| | | chaperonin) (CPN60) (Heat shock protein 60) (HSP-60) (Mitochondrial |
| | | matrix protein P1) (P60 lymphocyte protein) (HuCHA60) |
| 47 | 129902 | Phosphoglycerate kinase 1 (Primer recognition protein 2) (PRP 2) |
| 48 | 130749 | ALKALINE PHOSPHATASE, TISSUE-NONSPECIFIC ISOZYME |
| | | PRECURSOR |
| 49 | 132164 | RETINOBLASTOMA-ASSOCIATED PROTEIN(P105-RB) |
| 50 | 136066 | TRIOSEPHOSPHATE ISOMERASE |
| 51 | 136090 | TROPOMYOSIN BETA CHAIN, SKELETAL MUSCLE |
| 52 | 136213 | Troponin I, cardiac muscle |
| 53 | 141686 | ZINC FINGER PROTEIN 8 |
| 54 | 177836 | alpha-1-antitrypsin precursor |
| 55 | 178345 | alloalbumin Venezia |
| 56 | 178390 | aldehyde dehydrogenase |
| 57 | 178426 | alpha-fodrin |
| 58 | 178736 | apolipoprotein B100 |
| 59 | 178896 | beta-3-adrenergic receptor |
| 60 | 179279 | ATPase beta subunit |
| 61 | 180529 | chromogranin A |
| 62 | 181238 | cytochrome c1 |
| 63 | 184477 | retinoic acid receptor |
| 64 | 188590 | myosin light chain 3 |
| 65 | 188672 | mannose 6-phosphate receptor |
| 66 | 189422 | proliferating cell nuclear protein P120 |
| 67 | 189514 | p80-coilin |
| 68 | 190201 | porin |
| 69 | 190474 | salivary proline-rich protein 1 |
| 70 | 190804 | ubiquinone-binding protein |
| 71 | 190804 | UCR 6 ubiquinone-binding protein |
| 72 | 223374 | isomerase, triosephosphate |
| 73 | 223582 | histone H4 |
| 74 | 223632 | dismutase, Cu/Zn superoxide |
| 75 | 224309 | protein delta T3, glyco |
| 76 | 225897 | glycogen phosphorylase |
| 77 | 225985 | amyloid related serum protein SAA |
| 78 | 226007 | ventricular myosin L1 |
| 79 | 226021 | growth regulated nuclear 68 protein |
| 80 | 226209 | cox 8 |
| 81 | 227297 | ND FeS NADH dehydrogenase FeS protein |
| 82 | 227448 | phosphofructokinase |
| 83 | 228097 | receptor-like Tyr phosphatase |
| 84 | 229149 | hemoglobin beta |
| 85 | 229479 | lipoprotein Gln I |
| 86 | 229479 | lipoproteinGln I |
| 87 | 230004 | Human Neutrophil Elastase (HNE) (E.C.3.4.21.37) (Also Referred To As |
| | | Human Leucocyte Elastase (HLE)) Complex With Methoxysuccinyl-Ala- |
| | | Ala-Pro-Ala Chloromethyl Ketone (MSACK) |
| 88 | 231743 | G1/S-SPECIFIC CYCLIN D3 |
| 89 | 232472 | nucleotide diphosphate kinase subunit A, p19/nm23-H1 [human, Peptide |
| | | Partial, 12 aa, segment 1 of 3] |
| 90 | 238427 | Porin 31HM [human, skeletal muscle membranes, Peptide, 282 aa] |
| 91 | 251188 | protein phosphatase from PCR fragment H9 |
| 92 | 283950 | oxoglutarate dehydrogenase (lipoamide) (EC 1.2.4.2) precursor - human |
| 93 | 284319 | mucin-associated antigen - human (fragment) |
| 94 | 285975 | rab GDI |
| 95 | 292793 | T-cell receptor beta |
| 96 | 306926 | insulin-like growth factor binding protein 2 |
| 97 | 307021 | mu-immunoglobulin |
| 98 | 312137 | aldolase C |
| 99 | 337758 | pre-serum amyloid P component |
| 100 | 338017 | SEF2-1D protein |
| 101 | 339647 | thyroid hormone binding protein precursor |
| 102 | 346275 | myelin transcription factor 1 - human (fragment) |
| 103 | 352335 | reductase, NADH cytochrome b5 |
| 104 | 385479 | N-methyl-D-aspartate glutamate receptor channel; NMDA GluR channel |
| 105 | 386745 | guanine nucleotide-binding protein G-s-alpha-3 |
| 106 | 386872 | myoglobin |
| 107 | 387010 | pyruvate dehydrogenase E1-beta subunit precursor |
| 108 | 387011 | pyruvate dehydrogenase E1-alpha |
| 109 | 387011 | pyruvate dehydrogenase E1-alpha precursor |
| 110 | 387016 | phosphoglycerate mutase |
| 111 | 393124 | Unknown |
| 112 | 416776 | CD27 LIGAND(CD70 ANTIGEN) |
| 113 | 434755 | rat general mitochondrial matrix processing protease mRNA (RATMPP)., |
| | | similar to |
| 114 | 436222 | Unknown |
| 115 | 438650 | paired box protein |
| 116 | 448295 | TLS protein |
| 117 | 458862 | heart fatty acid binding protein; hFABP |
| 118 | 469045 | h-contactin 2 precursor |
| 119 | 476780 | Ras guanine nucleotide exchange factor son-of-sevenless (sos) 1 - |
| | | human |
| 120 | 481043 | MHC class III histocompatibility antigen HLA-B-associated protein 2 |
| | | [similarity] - human |
| 121 | 483239 | homeotic protein engrailed 2 - human |
| 122 | 499158 | acetoacetyl-CoA thiolase mitochondrial |
| 123 | 516764 | motor protein |
| 124 | 516768 | motor protein |
| 125 | 533538 | diamine oxidase, copper/topa quinone containing |
| 126 | 551604 | pregnancy-specific beta-1 glycoprotein |
| 127 | 553254 | cytochrome b5 reductase (EC 1.6.2.2) |
| 128 | 553597 | myosin heavy chain beta-subunit |
| 129 | 553734 | putative |
| 130 | 553734 | Unknown |
| 131 | 577307 | The ha3662 gene product is related to mouse glycerophosphate |
| | | dehydrogenase. |
| 132 | 595267 | gastrin-binding protein 78 kDa |
| 133 | 606609 | GBP |
| 134 | 627364 | adenovirus E1A-associated 130k protein - human |
| 135 | 627367 | desmoyokin - human (fragments) |
| 136 | 631070 | AHNAK-related protein - human (fragment) |
| 137 | 687714 | dynein heavy chain, isotype 1B |
| 138 | 703083 | cytochrome b5 |
| 139 | 704445 | ATPase subunit 8 |
| 140 | 728834 | Alu subfamily SB2 sequence contamination warning entry |
| 141 | 802150 | pancreatic peptidylglycine alpha-amidating monooxygenase; PA |
| 142 | 903598 | Krueppel-type zinc finger protein |
| 143 | 992629 | orf |
| 144 | 1000865 | This CDS feature is included to show the translation of the corresponding |
| | | V_region. Presently translation qualifiers on V_region features are illegal |
| 145 | 1001941 | dihydropyridine receptor alpha 1 subunit |
| 146 | 1033182 | Y-chromosome RNA recognition motif protein |
| 147 | 1053081 | calpastatin |
| 148 | 1065362 | Adp-Ribosylation Factor 1 Complexed With Gdp, Full Length Non- |
| | | Myristoylated |
| 149 | 1070477 | insulin receptor precursor - human |
| 150 | 1071834 | dihydrolipoamide S-succinyltransferase |
| 151 | 1082355 | epidermal autoantigen 450K (clone pE450-B) - human (fragment) |
| 152 | 1082428 | GTPase-activating protein rhoGAP |
| 153 | 1082553 | JC-kappa protein |
| 154 | 1082567 | laminin A3 |
| 155 | 1082692 | phospholipase C beta 3 |
| 156 | 1082723 | propionyl Coenzyme A carboxylase, beta polypeptide |
| 157 | 1082723 | propionyl-CoA carboxylase (EC 6.4.1.3) beta chain precursor - human |
| 158 | 1085294 | cell-cycle-dependent 350K nuclear protein - human (fragment) |
| 159 | 1085373 | protein disulfide-isomeraseER60 precursor |
| 160 | 1091688 | heat shock protein |
| 161 | 1096024 | isoAsp protein carboxyl methyltransferase |
| 162 | 1096067 | tat-associated protein |
| 163 | 1103677 | myosin-light-chain kinase |
| 164 | 1124876 | Krueppel-related DNA-binding protein |
| 165 | 1130694 | erythrocyte adducin alpha subunit |
| 166 | 1136416 | mitosis-specific chromosome segregation protein SMC1 of S. cerevisiae., |
| | | similar to |
| 167 | 1136741 | predicted protein of 548 amino acids |
| 168 | 1151113 | PDE1C3 |
| 169 | 1160932 | DRAL gene product gi\|7209525\|dbj\|BAA92253.1\| (AB038794) |
| | | DRAL/Slim3/FHL2 |
| 170 | 1168719 | C6.1A PROTEIN |
| 171 | 1168781 | EXTRACELLULAR CALCIUM-SENSING RECEPTOR PRECURSOR |
| 172 | 1169072 | APOPAIN PRECURSOR (CYSTEINE PROTEASE CPP32) (YAMA |
| | | PROTEIN) (CPP-32) (CASPASE-3) |
| 173 | 1169204 | dodecenoyl-CoA Delta-isomerase |
| 174 | 1170654 | ANTIGEN KI-67 |
| 175 | 1172554 | VDAC-2 |
| 176 | 1174572 | Thromboxane A2 receptor (TXA2-R) (Prostanoid TP receptor) |
| 177 | 1177230 | zinc finger |
| 178 | 1177438 | brca2 |
| 179 | 1184699 | tyrosyl-tRNA synthetase |
| 180 | 1196398 | Unknown |
| 181 | 1196433 | Unknown |
| 182 | 1220311 | elongation factor-1 alpha |
| 183 | 1235848 | HMG CoA synthase |
| 184 | 1235902 | FRAP-related protein |
| 185 | 1237406 | Cu/Zn-superoxide dismutase |
| 186 | 1245894 | cardiac myosin binding protein-C |
| 187 | 1245985 | beta 2-adrenergic receptor, beta 2AR {Y354A} [human, Peptide Partial |
| | | Mutagenesis, 24 aa] |
| 188 | 1246236 | ptp-IV1b, PTP-IV1 gene product |
| 189 | 1262579 | ND 1 |
| 190 | 1262580 | ND 2 |
| 191 | 1262581 | cox 1 |
| 192 | 1262582 | ATPase 6 |
| 193 | 1292941 | hydroxymethylglutaryl-CoA lyase |
| 194 | 1293561 | Diff40 gene product |
| 195 | 1335064 | fibrillin |
| 196 | 1335072 | G34 (big gastrin) |
| 197 | 1335212 | medullasin N-term. |
| 198 | 1335250 | Rod cGMP phosphodiesterase |
| 199 | 1335277 | Unknown |
| 200 | 1340142 | alpha1-antichymotrypsin |
| 201 | 1346317 | heat shock 70 kD protein 7 |
| 202 | 1351900 | NEUROBLAST DIFFERENTIATION ASSOCIATED PROTEIN |
| 203 | 1351900 | [Segment 1 of 2] Neuroblast differentiation associated protein AHNAK |
| | | (Desmoyokin) |
| 204 | 1351901 | NEUROBLAST DIFFERENTIATION ASSOCIATED PROTEIN |
| 205 | 1354222 | aldehyde dehydrogenase E3 |
| 206 | 1359715 | Na+, K+ ATPase |
| 207 | 1359715 | Na+, K+ ATPase |
| 208 | 1359759 | histamine H2 receptor |
| 209 | 1362755 | endopeptidase La homolog (EC 3.4.21.—) precursor, mitochondrial |
| | | (version 1) |
| 210 | 1381814 | skeletal muscle LIM-protein SLIM |
| 211 | 1399105 | phosphatidylinositol (4,5)bisphosphate 5-phosphatase homolog |
| 212 | 1399801 | p167 |
| 213 | 1408188 | desmin |
| 214 | 1504020 | Yeast translation activator GCN1 (P1: A48126), similar to |
| 215 | 1517899 | RAGE-1 ORF5; one of 3 possible coding regions |
| 216 | 1582692 | TATA box-binding protein |
| 217 | 1587138 | sorcin |
| 218 | 1587477 | TCOF1 gene |
| 219 | 1588292 | Ca channel: SUBUNIT = alpha: ISOTYPE = L |
| 220 | 1655594 | HES1 |
| 221 | 1657266 | S10 GTP-binding protein |
| 222 | 1665723 | RPD3 protein |
| 223 | 1688267 | polo like kinase |
| 224 | 1706611 | ELONGATION FACTOR TU, MITOCHONDRIAL PRECURSOR |
| 225 | 1708098 | Histone H1t |
| 226 | 1709123 | DNA MISMATCH REPAIR PROTEIN MSH6 (MUTS-ALPHA 160 KDA |
| | | SUBUNIT |
| 227 | 1709947 | PYRUVATE CARBOXYLASE PRECURSOR |
| 228 | 1710279 | dihyrolipoamide acetyl transferase |
| 229 | 1718502 | aconitase mitochondrial |
| 230 | 1718502 | aconitase, mitochondrial |
| 231 | 1730078 | 130 KDA LEUCINE-RICH PROTEIN(GP130) |
| 232 | 1731414 | ZINC FINGER PROTEIN 138 |
| 233 | 1762533 | carnitine palmitoyltransferase I |
| 234 | 1763238 | lysosomal trafficking regulator LYST |
| 235 | 1773381 | APXL |
| 236 | 1778410 | unknown |
| 237 | 1778432 | Treacher Collins syndrome |
| 238 | 1805280 | alpha II spectrin |
| 239 | 1869803 | fatty acid binding protein 3 |
| 240 | 1930110 | GM-CSF receptor alpha subunit soluble 3 |
| 241 | 1942187 | Lactoferrin, H253m N Terminal Lobe Of Human |
| 242 | 1943532 | Profilin I Crystallized In High Salt Actin-Binding Protein, Human Platelet |
| 243 | 2078329 | 3-hydroxyacyl-CoA dehydrogenase, isoform 2 |
| 244 | 2078470 | Putative gene. Genscan predictions confirmed by EST splicing.; coded for |
| | | by human cDNAs AA122029 (NID: g1678048), D31562 (NID: g644442), |
| | | AA158721 (NID: g1733515), R59640 (NID: g830335) and F13082 |
| | | (NID: g709111) |
| 245 | 2114493 | RNA editase |
| 246 | 2117022 | zinc finger 5 protein |
| 247 | 2117163 | leukocyte antigen, HLA-A2 variant |
| 248 | 2117707 | dihydrolipoamide S-(2-methylpropanoyl)transferase (EC 2.3.1.—) precursor - |
| | | human |
| 249 | 2117873 | pyruvate kinase (EC 2.7.1.40), muscle splice form M1 - human |
| 250 | 2118344 | arginine - tRNA ligase (EC 6.1.1.19) - human |
| 251 | 2118970 | histone H1 - human (fragment) |
| 252 | 2119268 | alpha-tubulin - human (fragment) |
| 253 | 2119390 | proapo-A-I protein - human |
| 254 | 2119533 | giantin |
| 255 | 2119712 | dnaK-type molecular chaperone HSPA1L heat shock protein |
| 256 | 2119918 | P43 - human |
| 257 | 2134903 | CG1 protein, kinectin 1 |
| 258 | 2135068 | enhancer protein |
| 259 | 2135611 | melanoma ubiquitous mutated protein - human (fragment) |
| 260 | 2135819 | neuropolypeptide h3, brain |
| 261 | 2135911 | 3′,5′-cyclic-nucleotide phosphodiesterase (EC 3.1.4.17) 4A, cAMP- |
| | | specific, long splice form - human |
| 262 | 2136207 | succinate-semialdehyde dehydrogenase (EC 1.2.1.24) - human |
| | | (fragment) |
| 263 | 2136282 | TOG protein |
| 264 | 2144337 | pyruvate dehydrogenase (lipoamide) (EC 1.2.4.1) beta chain precursor, |
| | | long splice form - human |
| 265 | 2145011 | putative collagen homolog protein-b |
| 266 | 2146960 | methyl CpG binding protein 2 - human (fragment) |
| 267 | 2217933 | PKU-beta |
| 268 | 2224581 | Unknown |
| 269 | 2224583 | Unknown |
| 270 | 2224621 | Unknown |
| 271 | 2224663 | Unknown |
| 272 | 2243110 | Unknown |
| 273 | 2244654 | HS24/P52 |
| 274 | 2270925 | beta4-integrin |
| 275 | 2286145 | caspase-like apoptosis regulatory protein |
| 276 | 2293556 | Ran binding protein 2 |
| 277 | 2306809 | X-linked nuclear protein |
| 278 | 2317769 | probable zinc finger protein H101 |
| 279 | 2393734 | C. elegans F11A10.5; 80% similarity to Z68297 (Pl |
| 280 | 2393763 | NAD (H)-specific isocitrate dehydrogenase gamma subunit |
| 281 | 2454586 | reverse transcriptase |
| 282 | 2465178 | COX7RP |
| 283 | 2498864 | RRP5 PROTEIN HOMOLOG |
| 284 | 2499753 | PROTEIN-TYROSINE PHOSPHATASE KAPPA PRECURSOR |
| 285 | 2506118 | MULTIDRUG RESISTANCE PROTEIN 1 |
| 286 | 2507187 | PROTEIN-L-ISOASPARTATE(D-ASPARTATE) O- |
| | | METHYLTRANSFERASE (PROTEIN-BETA-ASPARTATE |
| | | METHYLTRANSFERASE) (PIMT) |
| 287 | 2511440 | calcium/calmodulin-dependent protein kinase II; CaM kinase II |
| 288 | 2511779 | beta III spectrin |
| 289 | 2565032 | transcription activator/repressor protein delta/YY1; similar |
| 290 | 2624694 | Single-Stranded Dna Binding Protein, Human Mitochondrial |
| 291 | 2653817 | lipopolysaccharide binding protein |
| 292 | 2661211 | oxidative 3 alpha hydroxysteroid dehydrogenase |
| 293 | 2662397 | HADHB |
| 294 | 2665782 | voltage-gated sodium channel, subtype III |
| 295 | 2695574 | leukocyte function-associated molecule-1 alpha subunit |
| 296 | 2769254 | NIPSNAP2 protein |
| 297 | 2769254 | NIPSNAP2 protein |
| 298 | 2811135 | retinal rod Na+/Ca+, K+ exchanger |
| 299 | 2822143 | R30217_1 |
| 300 | 2852604 | Unknown |
| 301 | 2865252 | Unknown |
| 302 | 2873377 | exportin t |
| 303 | 2981731 | Cypa Complexed With Hagpia |
| 304 | 3012097 | F22329_1 |
| 305 | 3021386 | zinc finger protein |
| 306 | 3023143 | kappa 1 immunoglobulin light chain variable region |
| 307 | 3043584 | Unknown |
| 308 | 3043646 | Unknown |
| 309 | 3046880 | LIM-homeodomain protein LMX1B/LMX1.2 |
| 310 | 3114510 | T State Human Hemoglobin [alpha V96w], Alpha Aquomet, Beta Deoxy |
| 311 | 3123721 | ND 24 K NADH dehydrogenase 24-kDa subunit of complex I |
| 312 | 3153859 | thioredoxin delta 3 |
| 313 | 3168604 | proline and glutamic acid rich nuclear protein isoform |
| 314 | 3211975 | putative glialblastoma cell differentiation-related protein |
| 315 | 3211977 | sarco-/endoplasmic reticulum Ca-ATPase 3 |
| 316 | 3212539 | Isovaleryl-Coa Dehydrogenase At 2.6 Angstroms Resolution: Structural |
| | | Basis For Substrate Specificity |
| 317 | 3252827 | Unknown |
| 318 | 3252827 | Unknown |
| 319 | 3256185 | target of myb1homolog) |
| 320 | 3273228 | acyl-CoA dehydrogenase very-long-chain |
| 321 | 3273386 | plasmalemmal porin |
| 322 | 3294170 | dJ232K4.1 (hypothetical 141.7 kD protein JUMONJI) |
| 323 | 3299887 | ES/130-related protein |
| 324 | 3327040 | Unknown |
| 325 | 3327054 | Unknown |
| 326 | 3327054 | Unknown |
| 327 | 3360457 | cul-3 |
| 328 | 3402141 | Lysozymes At Constant Positions |
| 329 | 3402145 | Lysozyme |
| 330 | 3540239 | ND Fe-S2 NADH dehydrogenase-ubiquinone Fe-S protein 2 precursor |
| 331 | 3599521 | musculin |
| 332 | 3641621 | gp180-carboxypeptidase D-like enzyme |
| 333 | 3641621 | gp180-carboxypeptidase D-like enzyme |
| 334 | 3660040 | Fkbp Mutant F36v Complexed With Remodeled Synthetic Ligand |
| 335 | 3660556 | hdkk-4 |
| 336 | 3694663 | Unknown |
| 337 | 3717965 | DIA-12C |
| 338 | 3766197 | succinyl-CoA synthetase beta subunit, ATP-specific |
| 339 | 3766197 | succinyl-CoA synthetase beta subunit, ATP-specific |
| 340 | 3766199 | succinyl-CoA synthetase beta subunit GTP-specific |
| 341 | 3766451 | CHRNB2 |
| 342 | 3882147 | Unknown |
| 343 | 3882301 | Unknown |
| 344 | 3885362 | sepiapterin reductase |
| 345 | 3891975 | Cathepsin G |
| 346 | 3982589 | SOX-28 protein |
| 347 | 3986482 | translation initiation factor elF3 p40 subunit; elF3p40 |
| 348 | 4008131 | chaperonin 10 |
| 349 | 4096860 | fibronectin |
| 350 | 4097409 | PAX-9 |
| 351 | 4103446 | NAD+-specific isocitrate dehydrogenase beta subunit isoform A |
| 352 | 4127947 | guanine nucleotide-exchange factor |
| 353 | 4139720 | Chymase |
| 354 | 4151929 | PCAF-associated factor 400 |
| 355 | 4153874 | single-stranded mitochondrial DNA-binding protein precursor |
| 356 | 4204963 | MUC-1/X mucin short variant |
| 357 | 4206175 | ubiquitin-specific protease |
| 358 | 4210351 | novel protein |
| 359 | 4240227 | Unknown |
| 360 | 4240243 | Unknown |
| 361 | 4240305 | Unknown |
| 362 | 4261577 | CD8 beta chain |
| 363 | 4262430 | CMP-NeuAc: lactosylceramide alpha-2,3-sialyltransferase |
| 364 | 4263556 | Unknown |
| 365 | 4406346 | guanylate cyclase activating protein 3 |
| 366 | 4406564 | succinyl-CoA synthetase beta subunit GTP-specific |
| 367 | 4406651 | h-sco1 |
| 368 | 4416457 | mitotic checkpoint protein |
| 369 | 4495063 | yeast suppressor protein SRP40) dJ108K11.3 (similar to |
| 370 | 4501869 | acyl-Coenzyme A oxidase 2, branched chain |
| 371 | 4501967 | alpha-2C-adrenergic receptor; alpha-2C-1 adrenergic receptor; alpha-2C- |
| | | 1 adrenoceptor; alpha-2-adrenergic receptor, renal type; alpha2-AR-C4 |
| 372 | 4502011 | adenylate kinase 1 |
| 373 | 4502013 | adenylate kinase 2 isoform a; Adenylate kinase-2, mitochondrial |
| 374 | 4502097 | solute carrier family 25 (mitochondrial carrier; adenine nucleotide |
| | | translocator), member 4; adenine nucleotide translocator 1 (skeletal |
| | | muscle) |
| 375 | 4502101 | annexin I |
| 376 | 4502107 | annexin V |
| 377 | 4502111 | annexin VII isoform 1 |
| 378 | 4502201 | ADP-ribosylation factor 1 |
| 379 | 4502273 | ATPase, Na+/K+ transporting, alpha 3 polypeptide |
| 380 | 4502297 | ATPase delta F1 |
| 381 | 4502303 | ATPase OSCP F1 |
| 382 | 4502327 | AU RNA-binding protein/enoyl-Coenzyme A hydratase precursor |
| 383 | 4502331 | arginine vasopressin receptor 1A; V1a vasopressin receptor; |
| | | vascular/hepatic-type arginine vasopressin receptor; antidiuretic hormone |
| | | receptor 1A |
| 384 | 4502379 | BCL10 |
| 385 | 4502419 | biliverdin reductase B (flavin reductase (NADPH)) |
| 386 | 4502457 | ATP-binding cassette, sub-family B (MDR/TAP), member 11; ABC |
| | | member 16, MDR/TAP subfamily |
| 387 | 4502459 | basigin; collagenase stimulatory factor; M6 antigen |
| 388 | 4502509 | complement component 5 receptor 1 (C5a ligand); complement |
| | | component-5 receptor-2 (C5a ligand) |
| 389 | 4502517 | carbonic anhydrase I |
| 390 | 4502563 | calpain 2, large subunit |
| 391 | 4502601 | carbonyl reductase 3; carbonyl reductase3 [Homo sap |
| 392 | 4502603 | chromobox homolog 4 (Pc class homolog, Drosophila); chromobox |
| | | homolog 4 (Drosophila Pc class) |
| 393 | 4502703 | CDC6 homolog; CDC6 (cell division cycle 6, S. cerevisiae) homolog; |
| | | CDC18 (cell division cycle 18, S. pombe, homolog)-like; CDC6-related |
| | | protein |
| 394 | 4502719 | cadherin 13 preproprotein; H-cadherin; heart-cadherin; T-cad |
| 395 | 4502841 | carbohydratesulfotransferase 1 |
| 396 | 4502855 | sarcomeric mitochondrial creatine kinase precursor; creatine kinase, |
| | | mitochondrial 2; basic-type mitochondrial creatine kinase |
| 397 | 4502985 | cox 6b |
| 398 | 4502987 | cox 7a muscle |
| 399 | 4502989 | cox 7a liver |
| 400 | 4502991 | cox 7b |
| 401 | 4502993 | cox 7c |
| 402 | 4503015 | copine III |
| 403 | 4503021 | liver carnitine palmitoyltransferase I; L-CPT1 |
| 404 | 4503049 | cysteine-rich protein 2; Cystein-rich intestinal protein |
| 405 | 4503057 | crystallin, alpha B; crystallin, alpha-2; Rosenthal fiber component; heat- |
| | | shock 20 kD like-protein |
| 406 | 4503143 | cathepsin D |
| 407 | 4503177 | chromosome X open reading frame 2 |
| 408 | 4503269 | deoxycytidine kinase gi\|11436224\|ref\|XP_00347 |
| 409 | 4503301 | 2,4-dienoyl CoA reductase 1 precursor |
| 410 | 4503375 | dihydropyrimidinase |
| 411 | 4503431 | dysferlin; dystrophy-associated fer-1-like 1 |
| 412 | 4503443 | endothelin converting enzyme 1 |
| 413 | 4503447 | peroxisomal enoyl-coenzyme A hydratase-like protein; delta3,5-delta2,4- |
| | | dienoyl-CoA isomerase; peroxisomal enoyl-CoA hydratase 1; dienoyl-CoA |
| | | isomerase |
| 414 | 4503475 | eukaryotic translation elongation factor 1 alpha 2 |
| 415 | 4503507 | eukaryotic translation initiation factor 2, subunit 3 |
| 416 | 4503537 | eukaryotic translation initiation factor 4E binding protein 3 |
| 417 | 4503607 | electron transfer flavoprotein alpha polypeptide |
| 418 | 4503609 | electron transfer flavoprotein beta polypeptide |
| 419 | 4503613 | envoplakin |
| 420 | 4503651 | fatty-acid-Coenzyme A ligase, long-chain 1 |
| 421 | 4503667 | fibrillin 2 + F422 |
| 422 | 4503731 | FK506-binding protein 6 |
| 423 | 4503835 | frizzled 9 |
| 424 | 4503843 | adaptor-related protein complex 1, gamma 2 subunit; gamma2-a |
| 425 | 4503899 | N-acetylgalactosamine-6-sulfatase precursor |
| 426 | 4503937 | glioblastoma amplified sequence |
| 427 | 4504041 | guanine nucleotide binding protein (G protein), alpha inhibiting activity |
| | | polypeptide 2; Guanine nucleotide-binding protein (G protein), alpha- |
| | | inhibiting |
| 428 | 4504049 | guanine nucleotide binding proteintransducin alpha-chain |
| 429 | 4504067 | aspartate aminotransferase 1; glutamic-oxaloacetic transamin |
| 430 | 4504071 | platelet glycoprotein lb alpha polypeptide precursor |
| 431 | 4504169 | glutathione synthetase |
| 432 | 4504189 | glutathione transferase zeta 1 (maleylacetoacetate isomerase); |
| | | glutathione transferase Zeta 1 |
| 433 | 4504483 | hypoxanthine phosphoribosyltransferase 1 |
| 434 | 4504487 | histidine-rich calcium-binding protein precursor SARCOPLASMIC |
| | | RETICULUM |
| 435 | 4504517 | heat shock 27 kD protein 1 |
| 436 | 4504521 | heat shock 60 kD protein 1 (chaperonin) |
| 437 | 4504523 | heat shock 10 kD protein 1 (chaperonin 10) |
| 438 | 4504523 | heat shock 10 kD protein 1 (chaperonin 10) |
| 439 | 4504665 | interleukin 2 receptor, beta; Interleukin-2 receptor, beta polypeptide |
| 440 | 4504689 | IMP (inosine monophosphate) dehydrogenase 2 |
| 441 | 4504733 | insulin receptor substrate 4 |
| 442 | 4504795 | inositol 1,4,5-triphosphate receptor, type 3 |
| 443 | 4504867 | ring finger protein (C3HC4 type) 8; C3HC4-type zinc finger protein; zinc |
| | | finger protein |
| 444 | 4504975 | low density lipoprotein receptor precursor; LDLR precursor; LDL receptor |
| 445 | 4504991 | leukemia inhibitory factor (cholinergic differentiation factor); cholinergic |
| | | differentiation factor |
| 446 | 4505071 | MAP-kinase activating death domain protein |
| 447 | 4505093 | monoamine oxidase B |
| 448 | 4505093 | monoamine oxidase B |
| 449 | 4505145 | malic enzyme 2, NAD(+)-dependent, mitochondrial |
| 450 | 4505145 | malic enzyme 2, NAD(+)-dependent, mitochondrial; Malic enzyme, |
| | | mitochondrial; malic enzyme 2, mitochondrial; pyruvic-malic carboxylase; |
| | | malate dehydrogenase |
| 451 | 4505153 | MAP/ERK kinase kinase 3 |
| 452 | 4505249 | mutS homolog 3 (E. coli); mutS (E. coli) homolog 3 |
| 453 | 4505257 | moesin |
| 454 | 4505257 | moesin |
| 455 | 4505355 | ND B8 |
| 456 | 4505357 | ND 9k NDUFA4 |
| 457 | 4505359 | ND B14 |
| 458 | 4505361 | ND B12 |
| 459 | 4505363 | ND 16k, SGDH |
| 460 | 4505365 | ND B17 |
| 461 | 4505367 | ND 6k |
| 462 | 4505369 | ND 18K NADH dehydrogenase (ubiquinone) Fe-S protein 4 (18 kD) |
| | | (NADH-coenzyme Q reductase); NADH dehydrogenase (ubiquinone) Fe- |
| | | S protein 4, 18 kD (NADH-coenzyme Q; mitochondrial respiratory chain |
| | | complex I (18-KD subunit) |
| 463 | 4505371 | ND 23K NADH dehydrogenase (ubiquinone) Fe-S protein 8 (23 kD) |
| | | (NADH-coenzyme Q reductase); NADH dehydrogenase (ubiquinone) Fe- |
| | | S protein 8 (23 kD) (NADH-coenzyme Q |
| 464 | 4505375 | neogenin homolog 1 (chicken); neogenin (chicken) homolog 1 |
| 465 | 4505399 | NIPSNAP homolog 1; 4-nitrophenylphosphatase domain and non- |
| | | neuronal SNAP25-like 1 |
| 466 | 4505405 | glycoprotein (transmembrane) nmb; transmembrane glycoprotein |
| 467 | 4505591 | peroxiredoxin 1; Proliferation-associated gene A; proliferation-associated |
| | | gene A (natural killer-enhancing factor A) |
| 468 | 4505621 | prostatic binding protein; phosphatidylethanolamine binding protein |
| 469 | 4505685 | pyruvate dehydrogenase (lipoamide) alpha 1; Pyruvate dehydrogenase, |
| | | E1-alpha polypeptide-1 |
| 470 | 4505687 | pyruvate dehydrogenase (lipoamide) beta; Pyruvate dehydrogenase, E1 |
| | | beta polypeptide |
| 471 | 4505693 | pyruvate dehydrogenase kinase, isoenzyme 4 |
| 472 | 4505717 | peroxisomal biogenesis factor 11A |
| 473 | 4505773 | Prohibitin |
| 474 | 4505775 | carrier phosphate isoform B |
| 475 | 4505775 | phosphate carrier precursor isoform 1b; phosphate carrier, mitochondrial; |
| | | phosphate carrier, mitochondrial precursor |
| 476 | 4505801 | phosphoinositide-3-kinase, class 3 |
| 477 | 4505869 | phospholipase C, gamma 1 (formerly subtype 148) |
| 478 | 4505887 | phospholamban |
| 479 | 4505893 | proteolipid protein 2 |
| 480 | 4505909 | peripheral myelin protein 2; M-FABP |
| 481 | 4505911 | postmeiotic segregation 1; Postmeiotic segregation increased (S. |
| | | cerevisiae)-like 1 |
| 482 | 4505925 | putative neurotransmitter receptor |
| 483 | 4505965 | POU domain, class 4, transcription factor 3 |
| 484 | 4506077 | protein kinase C substrate 80 KD-H |
| 485 | 4506091 | mitogen-activated protein kinase 6 |
| 486 | 4506189 | proteasome (prosome, macropain) subunit, alpha type, 7 |
| 487 | 4506197 | proteasome (prosome, macropain) subunit, beta type, 3; Proteasome |
| | | subunit, beta type, 3 |
| 488 | 4506291 | protein tyrosine phosphatase, non-receptor type 2, isoform 1; T-cell |
| | | protein tyrosine phosphatase |
| 489 | 4506371 | RAB5B, member RAS oncogene family |
| 490 | 4506401 | raf proto-oncogene serine/threonine protein kinase |
| 491 | 4506413 | RAP1A, member of RAS oncogene family; RAS-related protein RAP1A |
| 492 | 4506445 | RNA binding motif protein 4 |
| 493 | 4506517 | regulator of G-protein signalling 2, 24 kD |
| 494 | 4506787 | IQ motif containing GTPase activating protein 1; rasGAP-like with IQ |
| | | motifs |
| 495 | 4506959 | TAL1 (SCL) interrupting locus; SCL interrupting locus |
| 496 | 4506975 | carrier family 12 (sodium/potassium/chloride transporters), member 2 |
| 497 | 4506977 | carrier family 12 (sodium/chloride transporters), member 3 |
| 498 | 4506997 | solute carrier family 25 (mitochondrial carrier; oxoglutarate carrier), |
| | | member 11; solute carrier family 20 (oxoglutarate carrier), member 4 |
| 499 | 4507007 | carrier family 25 (mitochondrial carrier, Aralar), member 12; calcium |
| | | binding mitochondrial carrier superfamily member Aralar |
| 500 | 4507021 | solute carrier family 4, anion exchanger, member 1 (erythrocyte |
| | | membrane protein band 3, Diego blood group) |
| 501 | 4507185 | sepiapterin reductase (7,8-dihydrobiopterin:NADP+ oxidoreductase); |
| | | Sepiapterin reductase |
| 502 | 4507215 | signal recognition particle 54 kD |
| 503 | 4507299 | sudD suppressor of bimD6 homolog (A. nidulans); human homolog of |
| | | Aspergillus nidulans sudD gene product; sudD (suppressor of bimD6, |
| | | Aspergillus nidulans) homolog |
| 504 | 4507389 | elongin A; transcription elongation factor B (SIII) |
| 505 | 4507401 | transcription factor 6-like 1 |
| 506 | 4507401 | transcription factor 6-like 1 (mitochondrial transcription factor 1-like) |
| 507 | 4507431 | thyrotrophic embryonic factor; Thyrotroph embryonic factor |
| 508 | 4507443 | transcription factor AP-2 beta (activating enhancer binding protein 2 beta); |
| | | transcription factor AP-2 beta (activating enhancer-binding protein 2 beta) |
| 509 | 4507609 | tumor necrosis factor (ligand) superfamily, member 9 |
| 510 | 4507643 | tumor protein D52-like 2; hD54 |
| 511 | 4507645 | triosephosphate isomerase 1 |
| 512 | 4507645 | triosephosphate isomerase 1 |
| 513 | 4507665 | tyrosylprotein sulfotransferase 1 |
| 514 | 4507677 | tumor rejection antigen (gp96) 1; Tumor rejection antigen-1 (gp96) |
| 515 | 4507713 | tetratricopeptide repeat domain 2 |
| 516 | 4507733 | Tu translation elongation factor, mitochondrial |
| 517 | 4507783 | ubiquitin-conjugating enzyme E2H (homologous to yeast UBC8) |
| 518 | 4507789 | ubiquitin-conjugating enzyme E2L 3 |
| 519 | 4507793 | ubiquitin-conjugating enzyme E2N |
| 520 | 4507841 | ubiquinol-cytochrome c reductase core protein I |
| 521 | 4507843 | ubiquinol-cytochrome c reductase core protein II |
| 522 | 4507853 | ubiquitin specific protease, proto-oncogene; Unph |
| 523 | 4507857 | ubiquitin specific protease 7 (herpes virus-associated) |
| 524 | 4507879 | voltage-dependent anion channel 1 |
| 525 | 4507913 | WAS protein family, member 1; WASP family Verprolin-homologous |
| | | protein; scar, dictyostelium, homology of, 1 |
| 526 | 4507953 | tyrosine 3-monooxygenase/tryptophan 5-monooxygenase activation |
| | | protein, zeta polypeptide; Tyrosine 3-monooxygenase/tryptophan 5- |
| | | monooxygenase activation |
| 527 | 4507963 | zinc finger protein homologous to Zfp37 in mouse |
| 528 | 4507979 | zinc finger protein 132 |
| 529 | 4522026 | Bassoon protein; match to PID: g3043642; similar to PID: g3413810, C- |
| | | terminus matches KIAA0559, N-terminus similar to |
| 530 | 4529887 | NG35 |
| 531 | 4557032 | lactate dehydrogenase B |
| 532 | 4557036 | microseminoprotein, beta |
| 533 | 4557044 | propionyl Coenzyme A carboxylase, beta polypeptide |
| 534 | 4557235 | acyl-CoA dehydrogenase very long chain |
| 535 | 4557247 | acylphosphatase 2, muscle type |
| 536 | 4557265 | beta-1-adrenergic receptor gi\|15298066\|ref\|XP |
| 537 | 4557305 | aldolase A protein |
| 538 | 4557311 | adenosine monophosphate deaminase 1 (isoform M) |
| 539 | 4557317 | annexin XI |
| 540 | 4557365 | Bloom syndrome protein |
| 541 | 4557403 | carnitine/acylcarnitine translocase; Carnitine-acylcarnitine translocase; |
| | | carnitine-acylcarnitine carrier; solute carrier family 25 |
| | | (carnitine/acylcarnitine translocase), member 20 |
| 542 | 4557403 | carrier carnitine-acylcarnitine translocase |
| 543 | 4557409 | cardiac calsequestrin 2 |
| 544 | 4557439 | cyclin-dependent kinase 3 |
| 545 | 4557451 | chromodomain helicase DNA binding protein 3; Mi-2a; zinc-finger |
| | | helicase (Snf2-like) |
| 546 | 4557565 | excision repair cross-complementing rodent repair deficiency, |
| | | complementation group 6 |
| 547 | 4557579 | fatty acid binding protein 4, adipocyte; A-FABP |
| 548 | 4557657 | immature colon carcinoma transcript 1 |
| 549 | 4557735 | monoamine oxidase A |
| 550 | 4557759 | myeloperoxidase |
| 551 | 4557765 | 5-methyltetrahydrofolate-homocysteine methyltransferase; 5- |
| | | methyltetrahydrofolate-homocysteine methyltransferase 1 |
| 552 | 4557767 | methylmalonyl Coenzyme A mutase precursor |
| 553 | 4557769 | mevalonate kinase |
| 554 | 4557771 | protein C, cardiac; myosin-binding protein C, cardiac |
| 555 | 4557775 | myosin light chain 2 |
| 556 | 4557817 | Succinyl CoA: 3-oxoacid CoA transferase |
| 557 | 4557817 | Succinyl CoA: 3-oxoacid CoA transferase; succinyl-CoA: 3-ketoacid-CoA |
| | | transferase precursor |
| 558 | 4557833 | Propionyl-Coenzyme A carboxylase, alpha polypeptide |
| 559 | 4557845 | ribonucleotide reductase M2 polypeptide |
| 560 | 4557867 | sulfite oxidase |
| 561 | 4557867 | sulfite oxidase, mitochondrial |
| 562 | 4557876 | ATP-binding cassette, sub-family A member 4; ATP binding cassette |
| | | transporter; ATP-binding transporter, retina-specific; rim protein |
| 563 | 4587083 | MRP5 |
| 564 | 4589504 | Unknown |
| 565 | 4589644 | Unknown |
| 566 | 4678807 | Unknown |
| 567 | 4680705 | CGI-33 protein |
| 568 | 4680721 | thyroid peroxidase |
| 569 | 4689104 | ND ASHI |
| 570 | 4730927 | spermatogenesis associated PD1 |
| 571 | 4757732 | programmed cell death 8 (apoptosis-inducing factor) |
| 572 | 4757762 | ring finger protein 14; androgen receptor associated protein |
| 573 | 4757786 | N-acylsphingosine amidohydrolase (acid ceramidase) |
| 574 | 4757852 | BCS1 (yeast homolog)-like |
| 575 | 4758024 | coilin; coilin p80 |
| 576 | 4758030 | coatomer protein complex, subunit alpha; alpha coat protein; xenin |
| 577 | 4758038 | cox 5a |
| 578 | 4758040 | cox 6c |
| 579 | 4758118 | mitochondrial ribosomal protein S29, 28S death associated protein 3; |
| 580 | 4758118 | mitochondrial ribosomal protein S29, 28S death associated protein 3; |
| 581 | 4758120 | death-associated protein 1 |
| 582 | 4758156 | diacylglycerol kinase, iota |
| 583 | 4758192 | serine/threonine kinase 17a (apoptosis-inducing) |
| 584 | 4758242 | early development regulator 2; homolog of polyhomeotic 2 |
| 585 | 4758312 | electron-transferring-flavoprotein dehydrogenase |
| 586 | 4758352 | ferredoxin 1 precursor; adrenodoxin |
| 587 | 4758490 | GTP binding protein 1 |
| 588 | 4758498 | hexose-6-phosphate dehydrogenase precursor |
| 589 | 4758504 | hydroxyacyl-Coenzyme A dehydrogenase, type II |
| 590 | 4758520 | hect domain and RLD 2 |
| 591 | 4758520 | hect domain and RLD 2 |
| 592 | 4758570 | heat shock 70 kD protein 9B (mortalin-2); heat shock 70 kD protein 9 |
| | | (mortalin); Heat-shock 70 kD protein-9 (mortalin); mot-2; mthsp75 |
| 593 | 4758582 | isocitrate dehydrogenase 3 (NAD+) gamma |
| 594 | 4758604 | interleukin enhancer binding factor 3, 90 kD; M-phase phosphoprotein 4; |
| | | nuclear factor associated with dsRNA |
| 595 | 4758664 | acetylglucosaminyltransferase-like protein |
| 596 | 4758682 | protease, serine, 15; Lon protease-like protein |
| 597 | 4758714 | microsomal glutathione S-transferase 3 |
| 598 | 4758750 | myosin IXB |
| 599 | 4758768 | ND 42k |
| 600 | 4758772 | ND B9 |
| 601 | 4758774 | ND 22k, PDSW |
| 602 | 4758776 | ND 7k |
| 603 | 4758778 | ND 8k, AGGG |
| 604 | 4758784 | ND B14.5 |
| 605 | 4758786 | ND 49k |
| 606 | 4758788 | ND 30k |
| 607 | 4758790 | ND 15k |
| 608 | 4758792 | ND 13 k-A |
| 609 | 4758818 | Notch homolog 4 (Drosophila); Notch, drosophila, homolog of, 4; Notch |
| | | (Drosophila) homolog 4 |
| 610 | 4758832 | neuregulin 2 isoform 1; neural- and thymus-derived activator for ErbB |
| | | kinases |
| 611 | 4758852 | organic cation transporter like 3 |
| 612 | 4758940 | chromosome 14 open reading frame 2; mitochondrial proteolipid 68 MP |
| | | homolog |
| 613 | 4758940 | mitochondrial proteolipid 68 MP homolog |
| 614 | 4759020 | RAB5C, member RAS oncogene family; RAB, member of RAS oncogene |
| | | family-like; RAB5C, member of RAS oncogene family |
| 615 | 4759068 | cytochrome oxidase deficient homolog 1 |
| 616 | 4759080 | succinate dehydrogenase complex, subunit A, flavoprotein precursor; |
| | | succinate dehydrogenase complex flavoprotein subunit precursor |
| 617 | 4759080 | succinate dehydrogenase, subunit A, flavoprotein (Fp) |
| 618 | 4759082 | serum deprivation response (phosphatidylserine-binding protein) |
| 619 | 4759112 | solute carrier family 16 (monocarboxylic acid transporters), member 3; |
| | | monocarboxylate transporter 3 |
| 620 | 4759144 | carrier family 9 (sodium/hydrogen exchanger), isoform 5 |
| 621 | 4759146 | slit homolog 2 (Drosophila); slit (Drosophila) homolog 2 |
| 622 | 4759160 | small nuclear ribonucleoprotein D3 polypeptide |
| 623 | 4759196 | symplekin |
| 624 | 4760549 | IDN3 |
| 625 | 4761539 | voltage-dependent calcium channel alpha 1G subunit b isoform |
| 626 | 4826643 | annexin A3 |
| 627 | 4826649 | mitochondrial ribosomal protein L49 |
| 628 | 4826649 | mitochondrial ribosomal protein L49; chromosome 11 open reading frame 4 |
| 629 | 4826655 | calbindin 1 |
| 630 | 4826661 | nuclear receptor subfamily 1, group I, member 3 |
| 631 | 4826661 | nuclear receptor subfamily 1, group I, member 3; constitutive androstane |
| | | receptor-beta; orphan nuclear hormone receptor |
| 632 | 4826772 | insulin-like growth factor binding protein, acid labile subunit |
| 633 | 4826848 | ND B13 |
| 634 | 4826850 | ND B14.5a NADH dehydrogenase (ubiquinone) 1 alpha subcomplex, 7 |
| | | (14.5 kD, B14.5a) |
| 635 | 4826852 | ND 8k |
| 636 | 4826856 | ND 75K NADH dehydrogenase (ubiquinone) Fe-S protein 1 (75 kD) |
| | | (NADH-coenzyme Q reductase); NADH dehydrogenase (ubiquinone), Fe- |
| | | S protein-1 (75 kD); NADH-ubiquinone oxidoreductase 75 kD subunit |
| | | precursor |
| 637 | 4826898 | profilin 1 |
| 638 | 4826914 | phospholipase A2, group IVB |
| 639 | 4826950 | kallikrein 7 |
| 640 | 4827065 | zinc finger protein 147 |
| 641 | 4877291 | receptor for Advanced Glycation End Products |
| 642 | 4885281 | glutamate dehydrogenase 1 |
| 643 | 4885331 | G protein-coupled receptor 42 |
| 644 | 4885389 | hydroxyacyl glutathione hydrolase; glyoxalase 2 |
| 645 | 4885389 | hydroxyacyl glutathione hydrolase; hydroxyacyl glutathione hydrolase; |
| | | glyoxalase 2; Hydroxyacyl glutathione hydrolase; glyoxalase II; |
| | | hydroxyacylglutathione hydroxylase |
| 646 | 4885401 | cytochrome c heme lyase |
| 647 | 4885533 | peptidylglycine alpha-amidating monooxygenase COOH-terminal |
| 648 | 4885553 | postmeiotic segregation increased 2-like 9 |
| 649 | 4885565 | peroxisomal acyl-CoA thioesterase |
| 650 | 4885615 | signal transducer and activator of transcription 2, 113 kD |
| 651 | 4885665 | achaete-scute complex homolog-like 2; achaete-scute complex |
| | | (Drosophila) homolog-like 2 |
| 652 | 4887552 | MUC-B1 |
| 653 | 4894370 | ND B22 |
| 654 | 4914601 | Unknown |
| 655 | 4929697 | CGI-114 protein |
| 656 | 5031609 | branched chain alpha-ketoacid dehydrogenase kinase |
| 657 | 5031631 | CD36 antigen |
| 658 | 5031691 | chromosome 21 open reading frame 33; human HES1 protein, homolog |
| | | to E. coli and zebrafish ES1 protein |
| 659 | 5031707 | glycoprotein A repetitions predominant precursor; garpin |
| 660 | 5031777 | isocitrate dehydrogenase 3 (NAD+) alpha |
| 661 | 5031777 | isocitrate dehydrogenase 3 alpha |
| 662 | 5031875 | lamin A/C |
| 663 | 5031881 | leucyl/cystinyl aminopeptidase; leucyl/cystinyl aminopeptidase |
| | | (oxytocinase) |
| 664 | 5031943 | transcription factor NSCL-1 helix-loop-helix protein |
| 665 | 5031987 | peptidylprolyl isomerase F MITOCHONDRIAL PRECURSOR( |
| 666 | 5032017 | RAD50 (S. cerevisiae) homolog |
| 667 | 5032051 | ribosomal protein S14 40S |
| 668 | 5032095 | carrier family 21 (prostaglandin transporter), member 2 |
| 669 | 5032181 | translocase of inner mitochondrial membrane Tim17b |
| 670 | 5032215 | translational inhibitor protein |
| 671 | 5051381 | FK506 binding protein 12-rapamycin associated protein 1 |
| 672 | 5059062 | pilin-like transcription factor |
| 673 | 5114261 | voltage-dependent anion channel isoform 2 |
| 674 | 5138999 | NADH-Ubiquinone reductase |
| 675 | 5174539 | malate dehydrogenase 1, NAD (soluble) |
| 676 | 5174539 | malate dehydrogenase 1, NAD (soluble); Malate dehydrogenase, soluble |
| 677 | 5174541 | malate dehydrogenase 2, NAD (mitochondrial); Malate dehydrogenase, |
| | | mitochondrial |
| 678 | 5174563 | MHC binding factor, beta |
| 679 | 5174627 | plasma glutamate carboxypeptidase; aminopeptidase |
| 680 | 5174739 | tubulin, beta, 5 |
| 681 | 5174743 | ubiquinol-cytochrome c reductase, Rieske iron-sulfur polypeptide 1 |
| 682 | 5360087 | NY-REN-6 antigen |
| 683 | 5453549 | thioredoxin peroxidase; thioredoxin peroxidase (antioxidant enzyme) |
| 684 | 5453559 | ATPase d F0 |
| 685 | 5453670 | golgi transport complex 1 (90 kD subunit); golgi transport complex 1 (90 kDa |
| | | subunit) |
| 686 | 5453750 | brain acid-soluble protein 1; neuronal tissue-enriched acidic protein |
| 687 | 5453890 | PIBF1 gene product |
| 688 | 5453902 | NIMA-interacting, 4 (parvulin) peptidyl-prolyl cis-trans isomerase EPVH |
| 689 | 5453990 | proteasome (prosome, macropain) activator subunit 1 (PA28 alpha) |
| 690 | 5454028 | related RAS viral (r-ras) oncogene homolog; Oncogene RRAS |
| 691 | 5454122 | translocase of inner mitochondrial membrane Tim23 |
| 692 | 5454148 | UNC13 |
| 693 | 5454152 | ubiquinol-cytochrome c reductase binding protein |
| 694 | 5454180 | zinc finger protein 193 |
| 695 | 5578989 | Unknown |
| 696 | 5689405 | Unknown |
| 697 | 5689555 | Unknown |
| 698 | 5701717 | UDP-N-acetylglucosamine:alpha-1,3-D-mannoside beta-1,4-N- |
| | | acetylglucosaminyltransferase IV-homologue |
| 699 | 5725250 | G7 protein |
| 700 | 5725370 | involved in chromosomal translocation |
| 701 | 5729802 | Unknown |
| 702 | 5729875 | progesterone binding protein |
| 703 | 5729877 | heat shock 70 kD protein 8; heat shock 70 kD protein 8 (HSP73); heat |
| | | shock cognate protein, 71-kDa; heat shock 70 kd protein 10 (HSC71) |
| 704 | 5729887 | IQ motif containing GTPase activating protein 2, RasGAP-related protein |
| 705 | 5729937 | metaxin 2 |
| 706 | 5729937 | metaxin 2 |
| 707 | 5729966 | MHC class I region ORF |
| 708 | 5730027 | GAP-associated tyrosine phosphoprotein p62 (Sam68) |
| 709 | 5730033 | sodium channel, voltage-gated, type X, alpha polypeptide |
| 710 | 5730110 | ubiquitin specific protease 3 gi\|10720340\|sp\|Q9Y6I4\|UBP3_HUMAN |
| | | UBIQUITIN CARBOXYL-TERMINAL HYDROLASE 3 |
| 711 | 5759173 | succinate dehydrogenase flavoprotein subunit |
| 712 | 5802182 | PPAR gamma coactivator-1 |
| 713 | 5802814 | Gag-Pro-Pol-Env protein |
| 714 | 5802970 | AFG3 (ATPase family gene 3, yeast)-like 2 |
| 715 | 5803115 | mitofilin inner membrane protein, mitochondrial (mitofilin); motor protein |
| 716 | 5803135 | RAB35, member RAS oncogene family; ras-related protein rab-1 |
| 717 | 5803149 | coated vesicle membrane protein |
| 718 | 5803159 | sex comb on midleg (Drosophila)-like 1 |
| 719 | 5803201 | transmembrane trafficking protein |
| 720 | 5803207 | U2 small nuclear RNA auxillary factor 1; U2 snRNP auxiliary factor small |
| | | subunit; splicing factor U2AF 35 kDa subunit |
| 721 | 5821952 | Rotamer Strain As A Determinant Of Protein Structural Specificity |
| 722 | 5882259 | genethonin 3 |
| 723 | 5901896 | ATPase epsilon F1 |
| 724 | 5901926 | cleavage and polyadenylation specific factor 5, 25 kD subunit |
| 725 | 5901982 | isocitrate dehydrogenase 3 (NAD+) beta |
| 726 | 5902106 | SRY (sex determining region Y)-box 20 |
| 727 | 5902110 | SRY (sex determining region Y)-box 22; SPY (sex-determining region Y)- |
| | | box 22 |
| 728 | 5924409 | tight junction protein ZO-2 isoform C |
| 729 | 6005717 | ATPase e F0 |
| 730 | 6005772 | putative G protein coupled receptor |
| 731 | 6005938 | utrophin; dystrophin-related protein |
| 732 | 6005938 | utrophin; dystrophin-related protein |
| 733 | 6005948 | WW domain-containing binding protein 4; formin binding protein 21 |
| 734 | 6010711 | hereditary haemochromatosis protein precursor |
| 735 | 6031192 | phosphate carrier precursor isoform 1a; phosphate carrier, mitochondrial; |
| | | phosphate carrier, mitochondrial precursor |
| 736 | 6041669 | ND B15 |
| 737 | 6094658 | truncated form of cytochrome Bc1 J chain; similar to 1BGY |
| 738 | 6175038 | Son of sevenless protein homolog 2 (SOS-2) |
| 739 | 6176530 | alanine-glyoxylate aminotransferase homolog |
| 740 | 6249687 | R31155_1 |
| 741 | 6273778 | trabeculin-alpha |
| 742 | 6274550 | ND B22 NADH dehydrogenase (ubiquinone) 1 beta subcomplex, 9 (22 kD, |
| | | B22) |
| 743 | 6288790 | beta-ureidopropionase |
| 744 | 6330385 | Unknown |
| 745 | 6331429 | Unknown |
| 746 | 6382058 | v-abl Abelson murine leukemia viral oncogene homolog 1 isoform b; |
| | | Abelson murine leukemia viral (v-abl) oncogene homolog 1 |
| 747 | 6382071 | diaphanous 2 isoform 12C; Diaphanous, Drosophila, homolog of, 2; |
| | | diaphanous (Drosophila, homolog) 2 |
| 748 | 6433936 | aczonin |
| 749 | 6456828 | phosphoglycerate kinase 1 |
| 750 | 6523797 | adrenal gland protein AD-002 |
| 751 | 6572219 | UCR ubiquinol-cytochrome c reductase, Rieske iron-sulfur polypeptide- |
| | | like 1) dJ370M22.2 ( |
| 752 | 6580492 | cN28H9.1 (novel protein) |
| 753 | 6594629 | pRGR2 |
| 754 | 6598323 | GDP dissociation inhibitor 2; rab GDP-dissociation inhibitor, beta |
| 755 | 6624122 | 3-hydroxyisobutyrate dehydrogenase |
| 756 | 6631100 | natural killer-tumor recognition sequence |
| 757 | 6649914 | growth/differentiation factor-11 |
| 758 | 6678455 | transcription termination factor, RNA polymerase I |
| 759 | 6681764 | ND 39k NADH dehydrogenase (ubiquinone) 1 alpha subcomplex, 9 |
| | | (39 kD); NADH dehydrogenase (ubiquinone) Fe-S protein 2-like (NADH- |
| | | coenzyme Q reductase) |
| 760 | 6683124 | Unknown |
| 761 | 6686262 | ZINC FINGER PROTEIN 36 |
| 762 | 6688130 | poly-(ADP-ribose) polymerase II |
| 763 | 6729803 | Heat-Shock 70 kd Protein 42 kd Atpase N-Terminal Domain |
| 764 | 6739500 | LDLR-FUT fusion protein |
| 765 | 6841066 | calcium-binding transporter |
| 766 | 6841110 | Unknown |
| 767 | 6841194 | HSPC272 |
| 768 | 6841440 | HSPC108 |
| 769 | 6841930 | T cell receptor beta chain |
| 770 | 6912238 | peroxiredoxin 5; antioxidant enzyme B166 |
| 771 | 6912322 | crumbs homolog 1; crumbs (Drosophila) homolog 1 |
| 772 | 6912396 | glyoxylate reductase/hydroxypyruvate reductase |
| 773 | 6912440 | double-stranded RNA-binding zinc finger protein JAZ |
| 774 | 6912482 | LETM1 leucine zipper-EF-hand containing transmembrane protein 1 |
| 775 | 6912482 | leucine zipper-EF-hand containing transmembrane protein 1 |
| 776 | 6912536 | nicotinamide nucleotide transhydrogenase |
| 777 | 6912536 | nicotinamide nucleotide transhydrogenase |
| 778 | 6912538 | neurotensin receptor 2; neurotensin receptor, type 2 |
| 779 | 6912664 | sirtuin 5, isoform 1; sir2-like 5; sirtuin type 5; sirtuin (silent mating type |
| | | information regulation 2, S. cerevisiae, homolog) 5; silent mating type |
| | | information regulation 2, S. cerevisiae, homolog 5 |
| 780 | 6912714 | translocase of inner mitochondrial membrane 9 homolog (yeast); |
| | | translocase of inner mitochondrial membrane 9 (yeast) homolog |
| 781 | 6912714 | translocase of inner mitochondrial membrane Tim9a |
| 782 | 6996429 | acetyl-coenzyme A synthethase (acetate-coA ligase)) dJ568C11.3 (novel |
| | | AMP-binding enzyme similar to |
| 783 | 6996429 | novel AMP-binding enzyme similar to acetyl-coenzyme A synthethase |
| | | (acetate-coA ligase) |
| 784 | 7018398 | hemopoietic cell kinase |
| 785 | 7019351 | cardiotrophin-like cytokine; neurotrophin-1/B-cell stimulating factor-3 |
| 786 | 7019545 | secreted protein of unknown function |
| 787 | 7020216 | Unknown |
| 788 | 7020807 | mitochondrial ribosomal protein L22, similar to |
| 789 | 7022241 | Unknown |
| 790 | 7022343 | Unknown |
| 791 | 7022728 | Unknown |
| 792 | 7022751 | Unknown |
| 793 | 7242949 | Unknown |
| 794 | 7242979 | Unknown |
| 795 | 7243141 | Unknown |
| 796 | 7243219 | Unknown |
| 797 | 7243272 | Unknown |
| 798 | 7243280 | Unknown |
| 799 | 7245352 | Hexokinase I With Glucose And Adp In The Active Site, Mutant Monomer |
| | | Of Recombinant Human |
| 800 | 7329718 | Unknown |
| 801 | 7430427 | ionizing radiation resistance conferring protein - human |
| 802 | 7431153 | malate dehydrogenase (EC 1.1.1.37), cytosolic - human |
| 803 | 7431833 | NAD(P)+ transhydrogenase (B-specific) (EC 1.6.1.1) precursor, |
| | | mitochondrial - human |
| 804 | 7436377 | plasma membrane Ca2+-ATPase variant 4a PMCA4a - human |
| | | (fragment) |
| 805 | 7439346 | protein-tyrosine-phosphatase |
| 806 | 7441369 | tubulin beta chain - human |
| 807 | 7447071 | syntaxin |
| 808 | 7447698 | UDP glucuronosyltransferase (EC 2.4.1.—) 1A10 precursor - human |
| 809 | 7452946 | X-like 1 protein |
| 810 | 7459551 | Unknown |
| 811 | 7487801 | Unknown |
| 812 | 7511895 | Unknown |
| 813 | 7512435 | filamin, muscle |
| 814 | 7512482 | helicase II - human |
| 815 | 7512482 | helicase II - human gi\|606833\|gb\|AAC50069.1\|(U09820) helicase II |
| 816 | 7512513 | Unknown |
| 817 | 7512598 | Unknown |
| 818 | 7512628 | Unknown |
| 819 | 7512754 | Unknown |
| 820 | 7512754 | Unknown |
| 821 | 7512776 | Unknown |
| 822 | 7512977 | Unknown |
| 823 | 7513005 | Unknown |
| 824 | 7513021 | Unknown |
| 825 | 7513022 | Unknown |
| 826 | 7513076 | Unknown |
| 827 | 7513172 | N-chimerin homolog F25965_3 - human |
| 828 | 7513177 | ND 14.1K NADH dehydrogenase (ubiquinone) (EC 1.6.5.3) 14.1K chain - |
| | | human |
| 829 | 7513178 | ND acyl carrier NADH dehydrogenase (ubiquinone) (EC 1.6.5.3) acyl |
| | | carrier chain, mitochondrial - human (fragment) |
| 830 | 7513274 | probable thyroid receptor interactor - human (fragment) |
| 831 | 7513374 | thrombospondin-p50 - human (fragment) |
| 832 | 7524346 | adenylate kinase 2 isoform b; Adenylate kinase-2, mitochondrial |
| 833 | 7527760 | Unknown |
| 834 | 7582306 | ALEX3 protein |
| 835 | 7595299 | opioid growth factor receptor |
| 836 | 7643782 | HDCMD47P |
| 837 | 7656959 | calpain 7; calpain like protease; |
| 838 | 7656999 | catenin |
| 839 | 7657039 | death receptor 6 |
| 840 | 7657050 | hypothetical protein, estradiol-induced |
| 841 | 7657257 | translocase of outer mitochondrial membrane 20 (yeast) homolog |
| 842 | 7657257 | translocase of outer mitochondrial membrane 20homolog (TOM20) |
| 843 | 7657343 | metalloprotease 1 (pitrilysin family) |
| 844 | 7657347 | mitochondrial carrier homolog 2 |
| 845 | 7657347 | mitochondrial carrier homolog 2 |
| 846 | 7657369 | ND 19k NDUFA8 |
| 847 | 7657469 | rat integral membrane glycoprotein POM121, similar to |
| 848 | 7657486 | low molecular mass ubiquinone-binding protein |
| 849 | 7657534 | spastic ataxia of Charlevoix-Saguenay |
| 850 | 7657554 | soggy-1 gene; dickkopf-like 1 (soggy) |
| 851 | 7657562 | SH3-domain binding protein 4 |
| 852 | 7657581 | solute carrier family 25, member 13 (citrin) |
| 853 | 7657615 | podocin |
| 854 | 7661602 | DKFZP564B167 protein |
| 855 | 7661602 | Unknown |
| 856 | 7661678 | RAS-related protein RAP1B; K-REV DKFZP586H0723 protein; |
| 857 | 7661720 | HIRA interacting protein 5; HIRIP5 protein; HIRA-interacting protein 5; |
| | | HIRA-interacting protein 5 |
| 858 | 7661732 | HSPC009 protein |
| 859 | 7661732 | Unknown |
| 860 | 7661800 | HSPC141 protein |
| 861 | 7661872 | leucyl-tRNA synthetase, mitochondrial |
| 862 | 7661872 | leucyl-tRNA synthetase, mitochondrial; KIAA0028 protein |
| 863 | 7661960 | Rough Deal homolog, centromere/kinetochore protein; Rough Deal |
| | | (Drosophila) homolog, centromere/kinetochore protein |
| 864 | 7661996 | Unknown |
| 865 | 7662042 | Rho guanine nucleotide exchange factor 10 |
| 866 | 7662046 | Unknown |
| 867 | 7662092 | Unknown |
| 868 | 7662168 | Unknown |
| 869 | 7662190 | Unknown |
| 870 | 7662190 | Unknown |
| 871 | 7662280 | histone deacetylase 7B isoform HDRP; histone deacetylase 7; MEF-2 |
| | | interacting transcription repressor (MITR) protein; histone deacetylase 7B |
| 872 | 7662284 | Unknown |
| 873 | 7662314 | Unknown |
| 874 | 7662452 | Unknown |
| 875 | 7662470 | neuroligin 1 |
| 876 | 7662480 | Unknown |
| 877 | 7662639 | PTD011 protein |
| 878 | 7662645 | mitochondrial ribosomal protein S18B; mitochondrial ribosomal protein |
| | | S18-2; mitochondrial 28S ribosomal protein S18-2 |
| 879 | 7662673 | translocase of outer mitochondrial membrane 70 homolog A (yeast); |
| | | translocase of outer mitochondrial membrane 70 (yeast) homolog A; |
| | | KIAA0719 gene product |
| 880 | 7662673 | translocase of outer mitochondrial membrane 70homolog A |
| 881 | 7669477 | RNA-specific adenosine deaminase B1, isoform DRABA2b; RNA editase; |
| | | human dsRNA adenosine deaminase DRADA2b |
| 882 | 7669492 | glyceraldehyde-3-phosphate dehydrogenase |
| 883 | 7669520 | neuregulin 1 isoform ndf43; heregulin, alpha (45 kD, ERBB2 p 185- |
| | | activator); glial growth factor |
| 884 | 7671629 | KRAB box containing C2H2 type zinc finger protein |
| 885 | 7671653 | Unknown |
| 886 | 7677070 | silent information regulator 2 homolog |
| 887 | 7678804 | mitochondrial isoleucine tRNA synthetase |
| 888 | 7705485 | Unknown |
| 889 | 7705501 | Unknown |
| 890 | 7705594 | CGI-10 protein |
| 891 | 7705616 | CGI-112 protein |
| 892 | 7705626 | mitochondrial ribosomal protein S16 |
| 893 | 7705626 | mitochondrial ribosomal protein S16; 28S ribosomal protein S16, |
| | | mitochondrial |
| 894 | 7705646 | CGI-150 protein |
| 895 | 7705704 | glutathione S-transferase subunit 13 homolog mitochondrial |
| 896 | 7705738 | mitochondrial ribosomal protein S7; 30S ribosomal protein S7 homolog |
| 897 | 7705797 | CGI-87 protein |
| 898 | 7705805 | mitochondrial ribosomal protein S2 |
| 899 | 7705805 | mitochondrial ribosomal protein S2 |
| 900 | 7705889 | NEU1 protein |
| 901 | 7705987 | glycolipid transfer protein |
| 902 | 7706057 | mitochondrial ribosomal protein L27 |
| 903 | 7706073 | GS15 |
| 904 | 7706117 | peptide transporter 3; likely ortholog of rat peptide/histidine transporter 2 |
| 905 | 7706121 | testicular haploid expressed gene |
| 906 | 7706146 | hBOIT for potent brain type organic ion transporter |
| 907 | 7706154 | NM23-H8 |
| 908 | 7706314 | CGI-77 protein |
| 909 | 7706349 | mitochondrial ribosomal protein S33 |
| 910 | 7706449 | fatty-acid-Coenzyme A ligase, long-chain 5; long-chain acyl-CoA |
| | | synthetase 5; long-chain fatty acid coenzyme A ligase 5; FACL5 for fatty |
| | | acid coenzyme A ligase 5 |
| 911 | 7706481 | MO25 protein |
| 912 | 7706549 | CDC2-related protein kinase 7 |
| 913 | 7710129 | LIM domain only 6 |
| 914 | 7770231 | Unknown |
| 915 | 7799988 | large-conductance calcium-activated potassium channel beta |
| 916 | 7959706 | Unknown |
| 917 | 7959889 | Unknown |
| 918 | 7959907 | PRO2472 |
| 919 | 7981263 | Unknown |
| 920 | 8051579 | adenylate kinase 3; Adenylate kinase-3, mitochondrial; GTP: AMP |
| | | phosphotransferase |
| 921 | 8131894 | mitofilin |
| 922 | 8216989 | putative cell cycle control protein |
| 923 | 8217423 | bA108L7.7 (novel protein similar to C. elegans C25A1.13 (Tr: O02220)) |
| 924 | 8394499 | ubiquitin associated protein |
| 925 | 8488995 | ND 20K NADH-ubiquinone oxidoreductase 20 kDa subunit, mitochondrial |
| | | precursor (Complex I-20 KD) (CI-20 KD) (PSST subunit) |
| 926 | 8570444 | Contains similarity to an unnamed protein from Homo sapiens |
| 927 | 8574030 | diazepam binding inhibitor (GABA receptor modulator, acyl-Coenzyme A |
| | | binding protein))) dJ1013A10.3 (related to DBI ( |
| 928 | 8574070 | NFKB1 |
| 929 | 8671846 | RNA adenosine deaminase gene, exon 15, Contains similarity to |
| 930 | 8919645 | T-cell receptor beta chain |
| 931 | 8922081 | Unknown |
| 932 | 8922081 | Unknown |
| 933 | 8922275 | Unknown |
| 934 | 8922285 | Unknown |
| 935 | 8922307 | Unknown |
| 936 | 8922420 | neuropilin and tolloid like-2 |
| 937 | 8922465 | Unknown |
| 938 | 8922511 | mitochondrial ribosomal protein S18A |
| 939 | 8922517 | Unknown |
| 940 | 8922569 | Unknown |
| 941 | 8922629 | Unknown |
| 942 | 8922665 | Unknown |
| 943 | 8922701 | putative lipid kinase |
| 944 | 8922742 | Unknown |
| 945 | 8922787 | Unknown |
| 946 | 8922804 | Unknown |
| 947 | 8922838 | Unknown |
| 948 | 8923001 | Unknown |
| 949 | 8923221 | Unknown |
| 950 | 8923291 | Unknown |
| 951 | 8923390 | Unknown |
| 952 | 8923390 | Unknown |
| 953 | 8923415 | Unknown |
| 954 | 8923417 | Unknown |
| 955 | 8923528 | Unknown |
| 956 | 8923870 | hOAT4 |
| 957 | 8923930 | uncharacterized hematopoietic stem/progenitor cells protein |
| 958 | 8923930 | uncharacterized hematopoietic stem/progenitor cells protein MDS0 |
| 959 | 8927581 | testes-specific heterogenous nuclear ribonucleoprotein G-T |
| 960 | 8928067 | Malonyl-CoA decarboxylase, mitochondrial precursor (MCD) |
| 961 | 9049352 | 3-methylcrotonyl-CoA carboxylase biotin-containing subunit |
| 962 | 9256610 | protocadherin beta 15 precursor |
| 963 | 9257242 | succinate dehydrogenase complex, subunit B, iron sulfur (Ip); iron-sulfur |
| | | subunit |
| 964 | 9296943 | Cyclin T2 |
| 965 | 9297078 | UBIQUINOL-CYTOCHROME C REDUCTASE COMPLEX 7.2 KDA |
| | | PROTEIN |
| 966 | 9367862 | Unknown |
| 967 | 9438229 | phospholipase C beta 1 |
| 968 | 9501146 | meiotic DNA transesterase/topoisomerase homolog isoform 2 |
| 969 | 9506437 | FAPP1-associated protein 1 |
| 970 | 9506611 | Unknown |
| 971 | 9506611 | Unknown |
| 972 | 9506637 | rab11-binding protein gi\|7023581\|dbj\|BAA92015.1\|(AK001978) unnamed |
| | | protein product, similar to |
| 973 | 9506697 | Unknown |
| 974 | 9506713 | nucleolar protein family A, member 1; H/ACA small nucleolar RNPs |
| | | protein 1 |
| 975 | 9506785 | homeo box (H6 family) 1 |
| 976 | 9622528 | NSAID-activated protein 1 NAG-1 |
| 977 | 9884738 | AP-2 beta transcription factor |
| 978 | 9910184 | DC13 protein |
| 979 | 9910244 | mitochondrial ribosomal protein S22; gibt protein; chromosome 3 open |
| | | reading frame 5; mitochondrial 28S ribosomal protein S22 |
| 980 | 9910280 | UDP-glucose ceramide glucosyltransferase-like 1 |
| 981 | 9910382 | mitochondrial import receptor Tom22 |
| 982 | 9910382 | mitochondrial import receptor Tom22 |
| 983 | 9911130 | protein phosphatase |
| 984 | 9930803 | A kinase (PRKA) anchor protein 7 |
| 985 | 9955433 | Unknown |
| 986 | 9966799 | disrupter of silencing 10 |
| 987 | 9966893 | CGI-203 protein |
| 988 | 10047106 | carboxypeptidase A3 |
| 989 | 10047118 | G-protein gamma-12 subunit |
| 990 | 10047120 | insulin receptor tyrosine kinase substrate |
| 991 | 10047167 | Unknown |
| 992 | 10047177 | Unknown |
| 993 | 10047183 | Unknown |
| 994 | 10047187 | Unknown |
| 995 | 10047199 | Unknown |
| 996 | 10047213 | Unknown |
| 997 | 10047231 | Unknown |
| 998 | 10047239 | Unknown |
| 999 | 10047243 | Unknown |
| 1000 | 10047247 | Unknown |
| 1001 | 10047249 | Unknown |
| 1002 | 10047277 | Sarcolemmal-associated protein |
| 1003 | 10047277 | Unknown |
| 1004 | 10047279 | Unknown |
| 1005 | 10047281 | Unknown |
| 1006 | 10047283 | Unknown |
| 1007 | 10047317 | L-periaxin |
| 1008 | 10047329 | Unknown |
| 1009 | 10047335 | zinc finger protein |
| 1010 | 10047341 | Unknown |
| 1011 | 10047341 | Unknown |
| 1012 | 10047347 | Unknown |
| 1013 | 10047361 | Unknown |
| 1014 | 10092604 | HUG1 gene |
| 1015 | 10092623 | hematopoietic PBX-interacting protein gi\|9930 |
| 1016 | 10092657 | 13 kDa differentiation-associated protein; NADH: ubiquinone |
| | | oxidoreductase |
| 1017 | 10092657 | ND B17.2 |
| 1018 | 10120604 | L-3-Hydroxyacyl-Coa Dehydrogenase Complexed With Acetoacetyl-Coa |
| | | And Nad+ |
| 1019 | 10179599 | ND NDUFS2 |
| 1020 | 10179880 | muscle-specific protein |
| 1021 | 10181206 | GABA(A) receptor-associated protein like 1 |
| 1022 | 10190653 | sphingosine-1-phosphate lyase 1 |
| 1023 | 10190692 | junctophilin 3; junctophilin type3 gi\|9886738 |
| 1024 | 10241702 | putative ZIC3 Binding protein from Xenopus laevis, similar to |
| 1025 | 10241706 | Unknown |
| 1026 | 10257409 | natural resistance-associated macrophage protein 1 |
| 1027 | 10257494 | N-ethylmaleimide-sensitive factor |
| 1028 | 10334442 | hydroxysteroid (17-beta) dehydrogenase 7 |
| 1029 | 10334443 | Unknown |
| 1030 | 10334466 | Unknown |
| 1031 | 10337605 | peroxisomal short-chain alcohol dehydrogenase |
| 1032 | 10432782 | testin |
| 1033 | 10432971 | Unknown |
| 1034 | 10433147 | poly(A) polymerase gamma; SRP RNA 3′ adenylating enzyme/pap2 |
| 1035 | 10433320 | huntingtin-associated protein |
| 1036 | 10433905 | Unknown |
| 1037 | 10433929 | Unknown |
| 1038 | 10434023 | Unknown |
| 1039 | 10434055 | Unknown |
| 1040 | 10434106 | Fanconi anemia complementation group D2 protein |
| 1041 | 10434151 | Unknown |
| 1042 | 10434167 | Unknown |
| 1043 | 10434183 | Unknown |
| 1044 | 10434243 | Unknown |
| 1045 | 10434293 | Unknown |
| 1046 | 10434345 | Unknown |
| 1047 | 10434521 | Unknown |
| 1048 | 10434757 | Unknown |
| 1049 | 10434850 | zinc finger protein 226 |
| 1050 | 10434904 | Unknown |
| 1051 | 10434988 | Unknown |
| 1052 | 10435007 | Unknown |
| 1053 | 10435244 | Unknown |
| 1054 | 10435551 | Unknown |
| 1055 | 10435767 | Unknown |
| 1056 | 10435899 | Unknown |
| 1057 | 10435947 | Unknown |
| 1058 | 10436007 | Unknown |
| 1059 | 10436258 | Unknown |
| 1060 | 10436263 | Unknown |
| 1061 | 10436325 | Unknown |
| 1062 | 10436604 | Unknown |
| 1063 | 10437144 | Smac |
| 1064 | 10437144 | Unknown |
| 1065 | 10437178 | mitochondrial ribosomal protein L1 |
| 1066 | 10437189 | Unknown |
| 1067 | 10437384 | M-phase phosphoprotein 1 |
| 1068 | 10437960 | Unknown |
| 1069 | 10437984 | Unknown |
| 1070 | 10438291 | Unknown |
| 1071 | 10438353 | McKusick-Kaufman syndrome protein |
| 1072 | 10438441 | Unknown |
| 1073 | 10438702 | Unknown |
| 1074 | 10438857 | Unknown |
| 1075 | 10438928 | mitochondrial ribosomal protein S11 |
| 1076 | 10438968 | Unknown |
| 1077 | 10439079 | Unknown |
| 1078 | 10439244 | Unknown |
| 1079 | 10439312 | Unknown |
| 1080 | 10440252 | bromodomain PHD finger transcription factor |
| 1081 | 10440347 | Unknown |
| 1082 | 10440357 | Unknown |
| 1083 | 10440367 | Unknown |
| 1084 | 10440389 | Unknown |
| 1085 | 10440402 | Unknown |
| 1086 | 10440484 | Unknown |
| 1087 | 10441879 | Unknown |
| 1088 | 10441930 | Unknown |
| 1089 | 10443472 | Rhesus blood group-associated glycoprotein (RH50A) |
| 1090 | 10503988 | Unknown |
| 1091 | 10518340 | muscleblind (Drosophila)-like |
| 1092 | 10567164 | gene amplified in squamous cell carcinoma-1 |
| 1093 | 10639097 | solute carrier family 24 (sodium/potassium/calcium exchanger), member |
| | | 3) dJ122P22.1 ( |
| 1094 | 10645199 | ADAM-TS disintegrin and metalloprotease with thrombospondin motifs-7 |
| | | preproprotein; a disintegrin-like and metalloprotease (reprolysin type) with |
| | | thrombospondin type 1 motif, 7 |
| 1095 | 10716563 | calnexin |
| 1096 | 10719935 | CELL DIVISION CYCLE 2-LIKE PROTEIN KINASE 5(CDC2-RELATED PROTEIN |
| | | KINASE 5) |
| 1097 | 10720290 | SORTING NEXIN 14 |
| 1098 | 10720297 | SYNAPTOJANIN 2 (SYNAPTIC INOSITOL-1,4,5-TRISPHOSPHATE 5- |
| | | PHOSPHATASE 2) |
| 1099 | 10720409 | Zinc finger protein 294 |
| 1100 | 10764847 | ND B18 |
| 1101 | 10798812 | MLTK-alpha |
| 1102 | 10834587 | fer-1 like protein 3 |
| 1103 | 10834762 | PNAS-102 |
| 1104 | 10834786 | PNAS-117 |
| 1105 | 10834968 | mannosidase, alpha B, lysosomal |
| 1106 | 10835000 | pancreatic lipase |
| 1107 | 10835002 | Rho GDP dissociation inhibitor (GDI) beta |
| 1108 | 10835023 | inositol 1,4,5-triphosphate receptor, type 1 |
| 1109 | 10835025 | ND 24k |
| 1110 | 10835045 | retinaldehyde dehydrogenase 2 |
| 1111 | 10835057 | N-acetyltransferase, homolog of S. cerevisiae ARD1; N-acetyltransferase |
| | | ARD1, human homolog of |
| 1112 | 10835059 | farnesyltransferase, CAAX box, beta |
| 1113 | 10835063 | nucleophosmin (nucleolar phosphoprotein B23, numatrin) |
| 1114 | 10835087 | ND 10k |
| 1115 | 10835089 | neurofilament, heavy polypeptide (200 kD); Neurofilament, heavy |
| | | polypeptide |
| 1116 | 10835109 | myotubularin related protein 3; FYVE (Fab1 YGLO23 Vsp27 EEA1 |
| | | domain) dual-specificity protein phosphatase |
| 1117 | 10835155 | tumor necrosis factor (cachectin) |
| 1118 | 10835165 | CD59 antigen p18-20 |
| 1119 | 10835173 | nitric oxide synthase 1 |
| 1120 | 10835189 | glutathione reductase |
| 1121 | 10835220 | ATPase, Ca++ transporting, fast twitch 1 |
| 1122 | 10863907 | hepatocellular carcinoma associated protein; breast cancer |
| 1123 | 10863927 | peptidylprolyl isomerase A |
| 1124 | 10863945 | ATP-dependant DNA helicase II |
| 1125 | 10863985 | G4 protein |
| 1126 | 10864011 | CGI-44 protein; sulfide dehydrogenase like (yeast) |
| 1127 | 10864043 | kidney and liver proline oxidase 1 |
| 1128 | 10864077 | calcium channel, voltage-dependent, alpha 1H subunit |
| 1129 | 10945428 | membrane-associated guanylate kinase MAGI3 |
| 1130 | 11024710 | Unknown |
| 1131 | 11024714 | ubiquitin B |
| 1132 | 11034855 | Unknown |
| 1133 | 11038674 | CD79B antigen, isoform 1 precursor; B-cell-specific glycoprotein B29 |
| 1134 | 11055998 | guanine nucleotide binding protein beta subunit 4 [Homo sapi |
| 1135 | 11056030 | protocadherin gamma subfamily A, 2, isoform 1 precursor |
| 1136 | 11066958 | mutant beta-globin |
| 1137 | 11066968 | EH domain-containing protein FKSG7 |
| 1138 | 11095436 | valosin-containing protein |
| 1139 | 11096171 | RNA polymerase III transcription initiation factor B |
| 1140 | 11121497 | Trp4-associated protein TAP1, similar to |
| 1141 | 11127695 | SYT/SSX4 fusion protein |
| 1142 | 11128019 | cytochrome c |
| 1143 | 11128031 | protocadherin gamma subfamily B, 5, isoform 1 precursor |
| 1144 | 11139093 | GrpE-like protein cochaperone |
| 1145 | 11141885 | carrier family 5 (choline transporter), member 7 |
| 1146 | 11141891 | ERGL protein |
| 1147 | 11177148 | mitochondrial ribosomal protein L12 |
| 1148 | 11177148 | mitoribosomal protein L12 |
| 1149 | 11225260 | DNA TOPOISOMERASE I |
| 1150 | 11225266 | transient receptor potential cation channel, subfamily M, member 5; |
| | | MLSN1- and TRP-related; MLSN1 and TRP-related |
| 1151 | 11245229 | ninein-Lm isoform |
| 1152 | 11252721 | glutaryl-CoA dehydrogenase |
| 1153 | 11252721 | glutaryl-CoA dehydrogenase (EC 1.3.99.7) [imported] - human |
| 1154 | 11267525 | probable RNA helicase |
| 1155 | 11275568 | mucin 5B |
| 1156 | 11275986 | glycerol-3-phosphate dehydrogenase 3 |
| 1157 | 11276083 | fatty-acid-Coenzyme A ligase, long-chain 2 |
| 1158 | 11276083 | long-chain fatty-acid-Coenzyme A ligase 2; acyl-activating enzyme; acyl- |
| | | CoA synthetase; fatty acid thiokinase (long-chain); lignoceroyl-CoA |
| | | synthase; long-chain acyl-CoA synthetase 2 |
| 1159 | 11276655 | ribosomal protein S26 [imported] - human |
| 1160 | 11276938 | villin 2 |
| 1161 | 11277141 | heat shock 90 kD protein beta |
| 1162 | 11280538 | Unknown |
| 1163 | 11280677 | Unknown |
| 1164 | 11281511 | Unknown |
| 1165 | 11321341 | MondoA |
| 1166 | 11321569 | olfactory receptor, family 3, subfamily A, member 2 |
| 1167 | 11321571 | slit homolog 3 (Drosophila); slit (Drosophila) homolog 3; slit (Drosophila) |
| | | homolog 2; slit2 |
| 1168 | 11321579 | myosin, heavy polypeptide 13, skeletal muscle; extraocular muscle |
| | | myosin heavy chain |
| 1169 | 11321581 | succinyl-CoA synthetase alpha subunit |
| 1170 | 11321583 | succinate-CoA ligase, ADP-forming, beta subunit |
| 1171 | 11321613 | epilepsy, progressive myoclonus type 2, Lafora disease (laforin) |
| 1172 | 11321615 | T-box 3 protein; T-box 3; T-box transcription factor TBX3 |
| 1173 | 11323320 | ubiquitin-conjugating enzyme E2 variant 1 (isoform 2, similar to variant 2 |
| | | (UBE2V2, MMS2) |
| 1174 | 11342570 | metalloproteinase 24 (membrane-inserted), matrix |
| 1175 | 11342672 | myosin, heavy polypeptide 3, skeletal muscle, embryonic |
| 1176 | 11345448 | lipopolysaccharide-binding protein |
| 1177 | 11345456 | fibroblast growth factor receptor-like 1 precursor |
| 1178 | 11345478 | Unknown |
| 1179 | 11345539 | novel Helicase C-terminal domain |
| 1180 | 11359874 | GTP-binding protein 2 |
| 1181 | 11359883 | Unknown |
| 1182 | 11359946 | leucine zipper-EF-hand containing transmembrane protein 1 |
| 1183 | 11359985 | Unknown |
| 1184 | 11359986 | Unknown |
| 1185 | 11360009 | Bcl-Rambo |
| 1186 | 11360009 | Unknown |
| 1187 | 11360063 | matrilin 2 precursor |
| 1188 | 11360067 | Unknown |
| 1189 | 11360079 | Unknown |
| 1190 | 11360112 | Unknown |
| 1191 | 11360155 | Unknown |
| 1192 | 11360155 | Unknown |
| 1193 | 11360156 | Unknown |
| 1194 | 11360162 | Unknown |
| 1195 | 11360185 | Unknown |
| 1196 | 11360188 | Unknown |
| 1197 | 11360228 | Unknown |
| 1198 | 11360250 | Unknown |
| 1199 | 11360251 | Unknown |
| 1200 | 11360294 | Unknown |
| 1201 | 11360310 | myosin Vlla, long form - human |
| 1202 | 11360321 | properdin |
| 1203 | 11374664 | isocitrate dehydrogenase (EC 1.1.1.42), cytosolic |
| 1204 | 11385354 | polybromo 1 |
| 1205 | 11385644 | CTCL tumor antigen se2-1 |
| 1206 | 11385664 | CTCL tumor antigen se89-1 |
| 1207 | 11386147 | prosaposin |
| 1208 | 11399466 | D-2-hydroxy-acid dehydrogenase |
| 1209 | 11415024 | diacylglycerol kinase, alpha (80 kD) |
| 1210 | 11416393 | mitochondrial ribosomal protein L22 |
| 1211 | 11416669 | nicotinamide nucleotide transhydrogenase |
| 1212 | 11417363 | low molecular mass ubiquinone-binding protein |
| 1213 | 11417363 | low molecular mass ubiquinone-binding protein |
| 1214 | 11418549 | eyes absent (Drosophila) homolog 4 |
| 1215 | 11418714 | Unknown |
| 1216 | 11419832 | phosphorylase kinase, alpha 1 |
| 1217 | 11421027 | Unknown |
| 1218 | 11422272 | ribosomal protein S6 kinase, 90 kD |
| 1219 | 11423142 | basic leucine zipper nuclear factor 1 |
| 1220 | 11423880 | alpha-SNAP |
| 1221 | 11424404 | mitochondrial ribosomal protein S23 |
| 1222 | 11424724 | neurofilament 3 |
| 1223 | 11425565 | Unknown |
| 1224 | 11425836 | low density lipoprotein receptor-related protein 3 |
| 1225 | 11427613 | Unknown |
| 1226 | 11427636 | GTPase Rab14 |
| 1227 | 11428230 | aldehyde dehydrogenase 1 family, member B1 |
| 1228 | 11429803 | Unknown |
| 1229 | 11430299 | hexokinase 1 |
| 1230 | 11431667 | multiple inositol polyphosphate phosphatase 2 |
| 1231 | 11432018 | Unknown |
| 1232 | 11432441 | Unknown |
| 1233 | 11432489 | general transcription factor IIE, polypeptide 1 (alpha subunit, 56 kD) |
| 1234 | 11433007 | peroxisomal enoyl-coenzyme A hydratase-like protein |
| 1235 | 11433596 | tryptophanyl-tRNA synthetase |
| 1236 | 11434079 | Unknown |
| 1237 | 11434447 | Unknown |
| 1238 | 11434986 | COQ6_HUMAN PUTATIVE UBIQUINONE BIOSYNTHESIS |
| | | MONOOXGENASE COQ |
| 1239 | 11435257 | Unknown |
| 1240 | 11435724 | mannosidase, beta A, lysosomal |
| 1241 | 11436135 | RAS-RELATED PROTEIN R-RAS2 |
| 1242 | 11436533 | aldehyde dehydrogenase 2 family (mitochondrial) |
| 1243 | 11436778 | inositol polyphosphate-4-phosphatase, type II, 105 kD |
| 1244 | 11437205 | Unknown |
| 1245 | 11440003 | transgelin |
| 1246 | 11441230 | skeletal muscle specific actinin, alpha 3 |
| 1247 | 11493459 | PRO2619 |
| 1248 | 11493489 | PRO2620 |
| 1249 | 11493522 | Unknown |
| 1250 | 11493552 | Unknown |
| 1251 | 11496882 | ELK4 protein, isoform b; ETS-domain protein; SRF accessory protein 1 |
| 1252 | 11497601 | metallaproteinase-disintegrin |
| 1253 | 11526149 | ATPase CF6 F0 |
| 1254 | 11526456 | frataxin |
| 1255 | 11526471 | tripartite motif protein TRIM14 isoform alpha |
| 1256 | 11526573 | heat shock cognate protein 54 |
| 1257 | 11526789 | inorganic pyrophosphatase 2 |
| 1258 | 11545761 | potassium channel, subfamily K, member 12; tandem pore domain |
| | | potassium channel THIK-2 |
| 1259 | 11545847 | basic-helix-loop-helix-PAS protein |
| 1260 | 11545863 | methylcrotonoyl-Coenzyme A carboxylase 2 |
| 1261 | 11545869 | popeye protein 2 |
| 1262 | 11545894 | RFamide-related peptide precursor |
| 1263 | 11559927 | mitochondrial ribosomal protein S14 |
| 1264 | 11596402 | MAGE-D4 |
| 1265 | 11596859 | mitochondrial ribosomal protein L17 |
| 1266 | 11602741 | complement component 8, alpha polypeptide |
| 1267 | 11602963 | heparan sulfate proteoglycan perlecan |
| 1268 | 11611734 | GREB1a |
| 1269 | 11612659 | FXYD domain-containing ion transport regulator 7 |
| 1270 | 11612670 | phospholemman, isoform b precursor; FXYD domain-containing |
| 1271 | 11640566 | hydroxyacyl-Coenzyme A dehydrogenase/3-ketoacyl-Coenzyme A |
| | | thiolase/enoyl-Coenzyme A hydratase beta |
| 1272 | 11640578 | glyoxylate reductase/hydroxypyruvate reductase |
| 1273 | 11641249 | protein kinase Njmu-R1 |
| 1274 | 11641283 | LIM homeobox protein 5 |
| 1275 | 11641413 | cell division cycle 25B, isoform 3; CDC25B |
| 1276 | 11761696 | bHLHZip transcription factor BIGMAX gamma |
| 1277 | 11863673 | guanine nucleotide binding protein (G protein), alpha stimulating activity |
| | | polypeptide 1) dJ309F20.1.5 (isoform 5 of |
| 1278 | 11890755 | RNA helicase II/Gu protein |
| 1279 | 11907570 | mutant desmin |
| 1280 | 11908171 | Fas-binding protein Daxx |
| 1281 | 11935053 | sarcolemmal associated protein 1 |
| 1282 | 11968003 | 5-azacytidine induced gene 2, similar to |
| 1283 | 11968152 | somatostatin receptor-interacting protein |
| 1284 | 11990879 | phosphoglycerate kinase 2 |
| 1285 | 11991867 | odorant receptor HOR3′beta5 |
| 1286 | 12001946 | My003 protein |
| 1287 | 12001986 | My022 protein |
| 1288 | 12001992 | brain my025 |
| 1289 | 12002038 | brain my045 protein |
| 1290 | 12002042 | brain my048 protein |
| 1291 | 12002201 | serine/threonine protein kinase PFTAIRE-1 |
| 1292 | 12003293 | organic anion transporter 2 |
| 1293 | 12005493 | NPD011 |
| 1294 | 12005918 | GRIM19 |
| 1295 | 12006049 | EF1a-like protein |
| 1296 | 12006205 | TNFIP-iso |
| 1297 | 12038977 | Unknown |
| 1298 | 12043738 | thioredoxin reductase, mitochondrial |
| 1299 | 12052810 | Unknown |
| 1300 | 12052820 | COQ7 protein; timing protein; ubiquinone biosynthesis protein |
| 1301 | 12052826 | RAB-8b protein, small GTP-binding protein |
| 1302 | 12052828 | Unknown |
| 1303 | 12052872 | Unknown |
| 1304 | 12052908 | Unknown |
| 1305 | 12052971 | methyltransferase COQ3 |
| 1306 | 12052989 | Unknown |
| 1307 | 12052991 | Unknown |
| 1308 | 12053107 | Unknown |
| 1309 | 12053245 | Unknown |
| 1310 | 12053255 | Unknown |
| 1311 | 12060822 | serologically defined breast cancer antigen NY-BR-16 |
| 1312 | 12060832 | serologically defined breast cancer antigen NY-BR-40 |
| 1313 | 12061185 | ASC-1 complex subunit P200 |
| 1314 | 12081909 | semaphorin Y |
| 1315 | 12214171 | putative small GTP-binding protein (rab1b) |
| 1316 | 12214288 | dJ402H5.2 (novel protein similar to worm and fly proteins) |
| 1317 | 12230015 | CYTOCHROME B5 OUTER MITOCHONDRIAL MEMBRANE ISOFORM |
| | | PRECURSOR |
| 1318 | 12230075 | GLYCEROL KINASE, TESTIS SPECIFIC 1 |
| 1319 | 12232373 | rab6 GTPase activating protein (GAP and centrosome-associated) |
| 1320 | 12232421 | tricarboxylate carrier protein |
| 1321 | 12232477 | Unknown |
| 1322 | 12239360 | LYST-interacting protein LIP6 |
| 1323 | 12246901 | tumor protein D52-like 2 |
| 1324 | 12248755 | mono ATP-binding cassette protein |
| 1325 | 12314005 | Unknown |
| 1326 | 12314016 | transcription factor TFIIS, similar to |
| 1327 | 12314029 | proteasome subunit 7 |
| 1328 | 12314062 | Unknown |
| 1329 | 12314123 | uncharacterized hematopoietic stem/progenitor cells protein MDS030 |
| | | (8923932) |
| 1330 | 12314190 | dJ445H2.2 (novel protein) |
| 1331 | 12314195 | Unknown |
| 1332 | 12328445 | NPAS3 |
| 1333 | 12382773 | caspase recruitment domain protein 11 |
| 1334 | 12382789 | OSBP-related protein 7; ORP7 |
| 1335 | 12383092 | Unknown |
| 1336 | 12407403 | tripartite motif protein TRIM9 isoform alpha |
| 1337 | 12408656 | calpain 1, large subunit |
| 1338 | 12597655 | kinetochore protein |
| 1339 | 12620194 | Unknown |
| 1340 | 12620246 | CD36 |
| 1341 | 12620252 | CD36 |
| 1342 | 12620871 | phosphoinositide-3-kinase gamma catalytic subunit |
| 1343 | 12621903 | cathepsin S |
| 1344 | 12643256 | pilin-like transcription factor |
| 1345 | 12643326 | CIP1-INTERACTING ZINC FINGER PROTEIN (NUCLEAR PROTEIN |
| | | NP94) |
| 1346 | 12643329 | CGI-51 |
| 1347 | 12643417 | Pyruvate dehydrogenase protein X component, mitochondrial precursor |
| | | (Dihydrolipoamide dehydrogenase-binding protein of pyruvate |
| | | dehydrogenase complex) (E3-binding protein) (E3BP) (proX) |
| 1348 | 12643637 | ADAM-TS 4 PRECURSOR (A DISINTEGRIN AND |
| | | METALLOPROTEINASE WITH THROMBOSPONDIN MOTIFS 4) |
| 1349 | 12643716 | PROTEIN TYROSINE PHOSPHATASE, NON-RECEPTOR TYPE 13 |
| 1350 | 12643796 | RETINOBLASTOMA-BINDING PROTEIN 8 |
| 1351 | 12643896 | Zinc finger protein 236 |
| 1352 | 12644018 | AF-6 PROTEIN |
| 1353 | 12644090 | T-BOX TRANSCRIPTION FACTOR TBX18 |
| 1354 | 12644310 | COATOMER BETA SUBUNIT(BETA-COP) |
| 1355 | 12644370 | Zinc finger X-linked protein ZXDB |
| 1356 | 12652715 | nucleolar GTPase |
| 1357 | 12652761 | Unknown |
| 1358 | 12652763 | Unknown |
| 1359 | 12652773 | Unknown |
| 1360 | 12652981 | glycogen synthase kinase 3 beta |
| 1361 | 12652989 | Unknown |
| 1362 | 12653017 | LRP16 protein |
| 1363 | 12653371 | phosphoglycerate mutase 1 |
| 1364 | 12653507 | aspartate transaminase 2 |
| 1365 | 12653549 | mitochondrial ribosomal protein S6 |
| 1366 | 12653687 | Unknown |
| 1367 | 12653775 | helicase-like protein NHL |
| 1368 | 12653827 | mitochondrial carrier homolog 1 or presenilin-associated protein |
| 1369 | 12653855 | dynamitin |
| 1370 | 12654077 | NICE-5 protein |
| 1371 | 12654149 | Unknown |
| 1372 | 12654285 | peptide N-glycanase homolog |
| 1373 | 12654289 | transcription termination factor, mitochondrial |
| 1374 | 12654333 | HCDI protein |
| 1375 | 12654407 | N-Acetylglucosamine kinase |
| 1376 | 12654521 | Unknown |
| 1377 | 12654627 | metalloprotease 1 |
| 1378 | 12654675 | transcobalamin II; macrocytic anemia |
| 1379 | 12655133 | CGI-63 protein, similar to |
| 1380 | 12655157 | centrosomal protein 2 |
| 1381 | 12655195 | heat shock 75 protein |
| 1382 | 12656979 | antigen, T-cell receptor |
| 1383 | 12657106 | Unknown |
| 1384 | 12659007 | protein kinase D2 |
| 1385 | 12669909 | long-chain fatty-acid-Coenzyme A ligase 4, isoform 2; long-chain acyl- |
| | | CoA synthetase 4; acyl-activating enzyme |
| 1386 | 12697312 | putative chromatin modulator |
| 1387 | 12697482 | novel zinc finger protein similar to rat RIN ZF) |
| 1388 | 12697776 | polyadenylation specificity factor |
| 1389 | 12697899 | Unknown |
| 1390 | 12697903 | Unknown |
| 1391 | 12697947 | Unknown |
| 1392 | 12697951 | Unknown |
| 1393 | 12697957 | Unknown |
| 1394 | 12697983 | Unknown |
| 1395 | 12697991 | Unknown |
| 1396 | 12697995 | Unknown |
| 1397 | 12698037 | Unknown |
| 1398 | 12698043 | Unknown |
| 1399 | 12698057 | likley ortholog of rat CPG2 protein |
| 1400 | 12698069 | Unknown |
| 1401 | 12698075 | Unknown |
| 1402 | 12700223 | recombination activating protein 1 |
| 1403 | 12707570 | enoyl Coenzyme A hydratase, short chain, 1, mitochondrial |
| 1404 | 12711660 | protein kinase, lysine deficient 1 |
| 1405 | 12711664 | Unknown |
| 1406 | 12711674 | yeast Upf3, variant B, similar to |
| 1407 | 12725813 | poly(ADP-ribosyl)transferase |
| 1408 | 12729652 | cell adhesion molecule with homology to L1CAM (close homologue of L1) |
| 1409 | 12733033 | caldesmon 1 or) NAG22 protein |
| 1410 | 12733091 | replication initiation region protein (60 kD) |
| 1411 | 12734392 | annexin A13 |
| 1412 | 12734816 | PRP4/STK/WD splicing factor |
| 1413 | 12735217 | surfeit 5 |
| 1414 | 12735226 | adenylate kinase 3 alpha |
| 1415 | 12735430 | PKCq-interacting protein PICOT |
| 1416 | 12738042 | klotho |
| 1417 | 12738974 | Unknown |
| 1418 | 12740808 | A kinase anchor protein 10 |
| 1419 | 12741202 | UDP-Gal: betaGlcNAc beta 1,4-galactosyltransferase |
| 1420 | 12741866 | protein expressed in thyroid, similar to |
| 1421 | 12742008 | chondroitin sulfate proteoglycan 3 |
| 1422 | 12742415 | complement component C1q receptor |
| 1423 | 12751117 | PNAS-140 |
| 1424 | 12751119 | PNAS-141 |
| 1425 | 12751452 | PDZ domain-containing protein AIPC |
| 1426 | 12803243 | Unknown |
| 1427 | 12803281 | VDAC-3 |
| 1428 | 12803349 | transcription factor 19, similar to |
| 1429 | 12803387 | antiquitin 1 |
| 1430 | 12803567 | transgelin 2 |
| 1431 | 12803843 | protein kinase, cAMP-dependent, regulatory, type II, alpha, similar to |
| 1432 | 12803855 | metastasis suppressor protein |
| 1433 | 12803915 | glucosidase I, similar to |
| 1434 | 12804041 | nuclear protein E3-3 orf1 |
| 1435 | 12804069 | FK506-binding protein 4 (59 kD), similar to |
| 1436 | 12804185 | colon cancer-associated protein Mic1, similar to |
| 1437 | 12804225 | Unknown |
| 1438 | 12804313 | expressed sequence 2 embryonic lethal, similar to |
| 1439 | 12804319 | carbonyl reductase |
| 1440 | 12804667 | Unknown |
| 1441 | 12804743 | Unknown |
| 1442 | 12804755 | NPD002 protein, similar to |
| 1443 | 12804821 | Unknown |
| 1444 | 12804897 | branched chain aminotransferase 2, mitochondrial, similar to |
| 1445 | 12804901 | isocitrate dehydrogenase 3 gamma |
| 1446 | 12805021 | acyl-Coenzyme A dehydrogenase family, member 8 |
| 1447 | 12805031 | roundabouth |
| 1448 | 12830367 | serine/threonine kinase 33 |
| 1449 | 12862320 | WDC146 |
| 1450 | 12963353 | fenestrated-endothelial linked structure protein |
| 1451 | 13027604 | mitochondrial ribosomal protein S34 |
| 1452 | 13027608 | Unknown |
| 1453 | 13027640 | lysine-ketoglutarate reductase/saccharopine dehydrogenase |
| 1454 | 13095054 | ovarian immunoreactive antigen |
| 1455 | 13096727 | Smac Bound To Xiap-Bir3 Domain |
| 1456 | 13096755 | Ras G12v - Pi 3-Kinase Gamma Complex |
| 1457 | 13097156 | ND 39 k |
| 1458 | 13097243 | Unknown |
| 1459 | 13097693 | Unknown |
| 1460 | 13111705 | Carnitine O-acetyltransferase (Carnitine acetylase) (CAT) |
| 1461 | 13111762 | solute carrier family 19 (folate transporter), member 1, similar to |
| 1462 | 13112023 | coenzyme Q, 7homolog |
| 1463 | 13123976 | ARGININE-TRNA-PROTEIN TRANSFERASE 1 |
| 1464 | 13124237 | F-box only protein 10 |
| 1465 | 13124883 | HsKin17 protein |
| 1466 | 13128992 | Unknown |
| 1467 | 13128998 | Unknown |
| 1468 | 13129014 | Unknown |
| 1469 | 13129080 | Unknown |
| 1470 | 13129092 | Unknown |
| 1471 | 13129144 | Unknown |
| 1472 | 13161081 | testis protein |
| 1473 | 13177634 | surfactant protein B-binding protein |
| 1474 | 13177648 | EGF factor 8 protein |
| 1475 | 13177700 | Unknown |
| 1476 | 13184052 | butyrophilin, subfamily 2, member A3 |
| 1477 | 13194197 | kinesin family member 13B; guanylate kinase associated kinesin |
| 1478 | 13194522 | PMF-1 binding protein |
| 1479 | 13236495 | quinone oxidoreductase; NADPH |
| 1480 | 13236559 | Unknown |
| 1481 | 13242069 | nuclear transcription factor NFX2 |
| 1482 | 13242172 | potassium voltage-gated channel, Shab-related subfamily, member 2 |
| 1483 | 13242739 | myelin P2 protein |
| 1484 | 13249985 | Lowe oculocerebrorenal syndrome protein |
| 1485 | 13259127 | cullin CUL4B |
| 1486 | 13259497 | retinoblastoma-binding protein 1, isoform I |
| 1487 | 13272567 | ND 5 |
| 1488 | 13272568 | ND 6 |
| 1489 | 13272595 | ND 5 NADH dehydrogenase subunit 5 |
| 1490 | 13272697 | ND 1 NADH dehydrogenase subunit 1 |
| 1491 | 13272855 | ATPase 8 |
| 1492 | 13273190 | cox 2 |
| 1493 | 13274124 | Unknown |
| 1494 | 13276227 | chromogranin B(isoform 2) |
| 1495 | 13276598 | Unknown |
| 1496 | 13276617 | Unknown |
| 1497 | 13278690 | Unknown |
| 1498 | 13324710 | interleukin 3 receptor, alpha (low affinity); Interleukin-3 |
| 1499 | 13325066 | cadherin EGF LAG seven-pass G-type receptor 3; EGF-like-domain |
| 1500 | 13325162 | Unknown |
| 1501 | 13325394 | phosphatidylserine synthase 1, similar to |
| 1502 | 13359201 | Unknown |
| 1503 | 13375614 | peroxisomal long-chain acyl-coA thioesterase |
| 1504 | 13375634 | human immunodeficiency virus type I enhancer-binding protein |
| 1505 | 13375744 | Unknown |
| 1506 | 13375809 | Unknown |
| 1507 | 13375817 | Unknown |
| 1508 | 13375838 | Unknown |
| 1509 | 13375872 | Unknown |
| 1510 | 13375932 | Unknown |
| 1511 | 13375940 | Unknown |
| 1512 | 13375942 | Unknown |
| 1513 | 13376007 | Unknown |
| 1514 | 13376011 | engulfment and cell motility 3; ced-12 homolog 3 |
| 1515 | 13376021 | Unknown |
| 1516 | 13376038 | Unknown |
| 1517 | 13376052 | Unknown |
| 1518 | 13376093 | Unknown |
| 1519 | 13376107 | Unknown |
| 1520 | 13376144 | Unknown |
| 1521 | 13376284 | Unknown |
| 1522 | 13376331 | Unknown |
| 1523 | 13376437 | Unknown |
| 1524 | 13376445 | Unknown |
| 1525 | 13376490 | Unknown |
| 1526 | 13376580 | Unknown |
| 1527 | 13376617 | Unknown |
| 1528 | 13376640 | putative N-acetyltransferase |
| 1529 | 13376662 | Unknown |
| 1530 | 13376717 | Unknown |
| 1531 | 13376741 | Unknown |
| 1532 | 13376747 | Unknown |
| 1533 | 13376749 | Unknown |
| 1534 | 13376776 | Unknown |
| 1535 | 13376812 | type 1 protein phosphatase inhibitor |
| 1536 | 13376826 | UL16-binding protein 1 |
| 1537 | 13376854 | UBX domain-containing 1; UBX domain-containing 2 |
| 1538 | 13376991 | voltage-dependent calcium channel beta 2 subunit |
| 1539 | 13386494 | Unknown |
| 1540 | 13399777 | Macrophage Migration Inhibitory Factor (Mif) Complexed With Inhibitor. |
| 1541 | 13431759 | PARAPLEGIN |
| 1542 | 13431763 | Pre-mRNA cleavage complex II protein Pcf11 |
| 1543 | 13435131 | WW domain-containing binding protein 4 |
| 1544 | 13435350 | ferredoxin reductase isoform 1 |
| 1545 | 13436080 | cleft lip and palate associated transmembrane protein 1 |
| 1546 | 13436188 | mitochondrial ribosomal protein S2 |
| 1547 | 13436197 | Unknown |
| 1548 | 13436275 | LON PROTEASE HOMOLOG, MITOCHONDRIAL PRECURSOR |
| 1549 | 13436296 | Unknown |
| 1550 | 13436308 | Unknown |
| 1551 | 13436335 | IF-1 ATPase inhibitor precursor |
| 1552 | 13436395 | Unknown |
| 1553 | 13436413 | glucose phosphate isomerase |
| 1554 | 13445577 | EDAG |
| 1555 | 13449263 | Unknown |
| 1556 | 13449269 | Unknown |
| 1557 | 13469731 | breast cancer antigen NY-BR-1.1 |
| 1558 | 13470094 | apolipoprotein L, 5 |
| 1559 | 13477253 | Unknown |
| 1560 | 13487904 | Unknown |
| 1561 | 13489087 | serine (or cysteine) proteinase inhibitor, clade B (ovalbumin), member 1; |
| | | protease inhibitor 2 (anti-elastase) |
| 1562 | 13489095 | sialoadhesin precursor; sialic acid-binding immunoglobulin-like lectin 1 |
| 1563 | 13491972 | liver nuclear protein |
| 1564 | 13507059 | ubiquitin protein ligase |
| 1565 | 13509322 | suppression of tumorigenicity 5 |
| 1566 | 13514831 | DEAD/H (Asp-Glu-Ala-Asp/His) box polypeptide 10, ATP-dependent RNA |
| | | helicase |
| 1567 | 13516379 | aldehyde oxidase 1 |
| 1568 | 13518228 | methylcrotonoyl-Coenzyme A carboxylase |
| 1569 | 13528660 | ribosomal protein L4, similar to |
| 1570 | 13528960 | ND 18k |
| 1571 | 13529047 | transforming growth factor, alpha |
| 1572 | 13529221 | PTD017 protein |
| 1573 | 13529257 | aldo-keto reductase family 1, member B1 |
| 1574 | 13537192 | SCCA1b |
| 1575 | 13540475 | serum amyloid A2 |
| 1576 | 13540477 | wingless-type MMTV integration site family, member 3 precursor |
| 1577 | 13540574 | Unknown |
| 1578 | 13540576 | Unknown |
| 1579 | 13540590 | C/EBP-induced protein |
| 1580 | 13540606 | suppressor of potassium transport defect 3 g |
| 1581 | 13543342 | Unknown |
| 1582 | 13543446 | Unknown |
| 1583 | 13543618 | ATPase B F0 |
| 1584 | 13543706 | Unknown |
| 1585 | 13543933 | Unknown |
| 1586 | 13544007 | Unknown |
| 1587 | 13544072 | glycerol-3-phosphate dehydrogenase 1 (soluble), similarity to |
| 1588 | 13559241 | Unknown |
| 1589 | 13559363 | mitochondrial ribosomal protein L9 |
| 1590 | 13559404 | mitochondrial ribosomal protein L43 |
| 1591 | 13560110 | Unknown |
| 1592 | 13569848 | cell cycle progression 2 protein |
| 1593 | 13569913 | exonuclease NEF-sp |
| 1594 | 13569930 | toll-like receptor 10 |
| 1595 | 13569948 | Unknown |
| 1596 | 13569962 | small GTP-binding protein |
| 1597 | 13591536 | Unknown |
| 1598 | 13606056 | DNA dependent protein kinase catalytic subunit |
| 1599 | 13620885 | mitochondrial ribosomal protein S6 |
| 1600 | 13623251 | transcription factor EB, similar to |
| 1601 | 13623369 | Unknown |
| 1602 | 13623465 | peroxisomal long-chain acyl-coA thioesterase |
| 1603 | 13623483 | lysosomal-associated membrane protein 1 |
| 1604 | 13623595 | DNA segment on chromosome 191177 expressed sequence |
| 1605 | 13623615 | Unknown |
| 1606 | 13623617 | Unknown |
| 1607 | 13623635 | Unknown |
| 1608 | 13623689 | Unknown |
| 1609 | 13623693 | Unknown |
| 1610 | 13626125 | ADAM-TS-9 precursor (A disintegrin and metalloproteinase with |
| | | thrombospondin motifs 9) (ADAM-TS 9) (ADAM-TS9) |
| 1611 | 13627233 | aldo-keto reductase family 7, member A3 |
| 1612 | 13627252 | oxoglutarate dehydrogenase |
| 1613 | 13627389 | elongation factor-2 kinase |
| 1614 | 13627804 | acyl-Coenzyme A dehydrogenase, short/branched chain precursor |
| 1615 | 13628614 | Na, K-ATPase subunit alpha 2 |
| 1616 | 13628881 | Unknown |
| 1617 | 13629150 | cox 4 |
| 1618 | 13630128 | faciogenital dysplasia protein |
| 1619 | 13630492 | Unknown |
| 1620 | 13630567 | Unknown |
| 1621 | 13630862 | aldehyde dehydrogenase 5 family, member A1 |
| 1622 | 13630871 | Unknown |
| 1623 | 13630873 | protein kinase, cAMP-dependent, regulatory, type II, beta |
| 1624 | 13631242 | reelin |
| 1625 | 13631440 | PEROXIREDOXIN 2 |
| 1626 | 13631521 | mitochondrial ribosomal protein S7 |
| 1627 | 13631678 | UCR 5 |
| 1628 | 13631907 | mitogen-activated protein kinase kinase kinase kinase 1 |
| 1629 | 13632179 | myosin, heavy polypeptide 13, skeletal muscle |
| 1630 | 13632266 | thyroid hormone receptor interactor 2; PPARG binding protein |
| 1631 | 13632616 | carrier ANT2 |
| 1632 | 13632896 | phosphoglucomutase 1 |
| 1633 | 13633168 | plastin 3 precursor |
| 1634 | 13633370 | Notchhomolog 3 |
| 1635 | 13635754 | CTCL tumor antigen se1-1 |
| 1636 | 13635919 | Unknown (now 4507953) |
| 1637 | 13636042 | Unknown |
| 1638 | 13636047 | 3-hydroxyisobutyryl-Coenzyme A hydrolase |
| 1639 | 13636157 | Unknown |
| 1640 | 13636168 | eukaryotic translation elongation factor 1 beta 2 |
| 1641 | 13636504 | interferon-induced protein 75, 52 kD |
| 1642 | 13636598 | Unknown |
| 1643 | 13637083 | Unknown |
| 1644 | 13637529 | Unknown |
| 1645 | 13637537 | ETAA16 protein |
| 1646 | 13637608 | ND 75 K |
| 1647 | 13637631 | VDAC-2 voltage-dependent anion channel 2 (H. sapiens), similar to |
| 1648 | 13637711 | glycine cleavage system protein H (aminomethyl carrier) (H. sapiens), |
| | | similar to |
| 1649 | 13637735 | Unknown |
| 1650 | 13637796 | Unknown |
| 1651 | 13637833 | cox 7a like, COX7RP (cytochrome c oxidase subunit VII-related protein), |
| | | estrogen receptor binding CpG island |
| 1652 | 13637948 | glutathione S-transferase M5 |
| 1653 | 13638591 | Unknown |
| 1654 | 13638758 | Unknown |
| 1655 | 13639105 | Unknown |
| 1656 | 13639114 | succinate dehydrogenase, Ip |
| 1657 | 13639187 | Unknown |
| 1658 | 13639470 | Unknown |
| 1659 | 13639628 | acetyl-Coenzyme A acetyltransferase 1 (acetoacetyl Coenzyme A |
| | | thiolase), mitochondrial |
| 1660 | 13639817 | malic enzyme 3, NADP(+)-dependent, mitochondrial |
| 1661 | 13640712 | phosphoinositide-3-kinase, class 2, alpha polypeptide |
| 1662 | 13640950 | interleukin 11 receptor, alpha |
| 1663 | 13641918 | sirtuin 3 |
| 1664 | 13643253 | kinesin family member 3A |
| 1665 | 13643321 | Unknown |
| 1666 | 13643514 | Unknown |
| 1667 | 13643534 | ribosomal protein L12; 60S ribosomal protein L12 (H. sapiens), similar to |
| 1668 | 13643564 | exostoses 1 |
| 1669 | 13643652 | flavohemoprotein b5 + b5R |
| 1670 | 13643704 | protein tyrosine phosphatase, receptor type |
| 1671 | 13644108 | proteasome 26S subunit, non-ATPase, 1 |
| 1672 | 13644418 | Unknown |
| 1673 | 13644786 | butyrophilin, subfamily 1, member A1 |
| 1674 | 13645381 | HLA-B associated transcript 2 (H. sapiens), similar to |
| 1675 | 13645492 | heat shock 70 kD protein-like 1 |
| 1676 | 13645618 | dihydropyrimidinase related protein-3 |
| 1677 | 13646385 | creatine kinase, sarcomeric mitochondrial |
| 1678 | 13646774 | quinoid dihydropteridine reductase |
| 1679 | 13647276 | L-3-hydroxyacyl-Coenzyme A dehydrogenase, short chain |
| 1680 | 13647558 | carrier ANT1 |
| 1681 | 13647920 | gamma-glutamyltransferase 1 |
| 1682 | 13647960 | tumor necrosis factor, alpha-induced protein 2 |
| 1683 | 13648234 | Unknown |
| 1684 | 13648426 | cox assembly protein isoform 2 |
| 1685 | 13648611 | serine/threonine kinase 2 |
| 1686 | 13648964 | alanyl-tRNA synthetase |
| 1687 | 13649010 | odzhomolog 1 |
| 1688 | 13649058 | Unknown |
| 1689 | 13649119 | SEX gene |
| 1690 | 13649217 | VDAC-1 |
| 1691 | 13649475 | Unknown |
| 1692 | 13649658 | UCR ubiquinol-cytochrome c reductase binding protein |
| 1693 | 13650446 | heat shock 70 kD protein 2 |
| 1694 | 13650574 | glutamate dehydrogenase 2 mitochondrial precursor |
| 1695 | 13650639 | melanoma antigen, family B, 1 |
| 1696 | 13650785 | spectrin, beta, non-erythrocytic 5 |
| 1697 | 13650793 | elongation factor SIII p15 subunit |
| 1698 | 13650874 | putative receptor protein |
| 1699 | 13650942 | Unknown |
| 1700 | 13650992 | Unknown |
| 1701 | 13651038 | leukocyte immunoglobulin-like receptor, subfamily B (with TM and ITIM |
| | | domains), member 4 |
| 1702 | 13651229 | Rho GTPase activating protein 6 isoform 4 |
| 1703 | 13651413 | Fc fragment of IgG binding protein (H. sapiens), similar to |
| 1704 | 13651526 | androgen-induced prostate proliferative shutoff associated protein |
| 1705 | 13651706 | golgin-like protein |
| 1706 | 13651985 | type 1 RNA helicase pNORF1 or nonsense-mediated mRNA decay |
| | | trans-acting factor |
| 1707 | 13652204 | Unknown |
| 1708 | 13652240 | ribosomal protein S7 |
| 1709 | 13652246 | ARF protein |
| 1710 | 13652324 | ras-related small GTPasehypothetical protein X |
| 1711 | 13652801 | Rap1 guanine-nucleotide-exchange factor directly activated by cA |
| 1712 | 13653049 | acyl-Coenzyme A dehydrogenase, C-2 to C-3 short chain precursor |
| 1713 | 13653910 | carboxypeptidase D precursor |
| 1714 | 13654274 | Unknown |
| 1715 | 13654278 | Unknown |
| 1716 | 13654294 | Unknown |
| 1717 | 13654678 | Unknown |
| 1718 | 13654685 | ATP-binding cassette, sub-family C, member 1, isoform 6 |
| 1719 | 13655145 | UCR ubiquinol-cytochrome c reductase, Rieske iron-sulfur polypeptide- |
| | | like 1 |
| 1720 | 13655148 | EH-domain containing 2; EH domain containing 2, similar to |
| 1721 | 13655297 | Unknown |
| 1722 | 13676336 | Unknown |
| 1723 | 13676857 | heat shock 70 kD protein 2; Heat-shock 70 kD protein-2 |
| 1724 | 13699811 | WHSC1L1 protein isoform long; Wolf-Hirschhorn syndrome candidate 1- |
| | | like 1 protein |
| 1725 | 13751974 | Unknown |
| 1726 | 13774961 | autoimmune infertility-related protein |
| 1727 | 13775158 | Unknown |
| 1728 | 13775166 | Unknown |
| 1729 | 13775186 | ring finger protein 17 isoform long |
| 1730 | 13775208 | Unknown |
| 1731 | 13775210 | Unknown |
| 1732 | 13775216 | Unknown |
| 1733 | 13775232 | Unknown |
| 1734 | 13784938 | Unknown |
| 1735 | 13786129 | RAS-RELATED PROTEIN RAB-33B |
| 1736 | 13786847 | L-Lactate Dehydrogenase H Chain, Ternary Complex With Nadh And |
| | | Oxamate |
| 1737 | 13787197 | DEAD/Hbox polypeptide 11 |
| 1738 | 13787215 | sirtuin 5, isoform 2 |
| 1739 | 13787217 | FAT tumor suppressor 2 precursor; multiple epidermal growth factor-like |
| | | domains 1; cadherin family member 8 |
| 1740 | 13794267 | RAB7, member RAS oncogene family; Ras-associated protein RAB |
| 1741 | 13872241 | ligand of numb-protein X |
| 1742 | 13874437 | cerebral protein-11 |
| 1743 | 13876386 | epiplakin 1 |
| 1744 | 13899231 | mitochondrial ribosomal protein L9 |
| 1745 | 13899275 | Unknown |
| 1746 | 13929460 | PTH-responsive osteosarcoma B1 protein |
| 1747 | 13929467 | chemokine binding protein 2 |
| 1748 | 13937401 | Unknown |
| 1749 | 13937769 | RIKEN cDNA 1200013F24 gene, similar to |
| 1750 | 13937888 | heterogeneous nuclear ribonucleoprotein C |
| 1751 | 13938170 | Unknown |
| 1752 | 13938215 | taxol resistant associated protein |
| 1753 | 13938297 | heat shock cognate 71-kd protein, similar to |
| 1754 | 13938442 | neuronal protein, mitochondrial Complex I subunit |
| 1755 | 13938539 | cyclin D binding Myb-like transcription factor 1 |
| 1756 | 13938571 | Unknown |
| 1757 | 13938593 | Unknown |
| 1758 | 13938619 | creatine kinase, muscle |
| 1759 | 13994164 | Charcot-Marie-Tooth duplicated region transcript 1 |
| 1760 | 13994188 | AKAP-associated sperm protein |
| 1761 | 13994259 | mitochondrial ribosomal protein S5 |
| 1762 | 13994280 | complement-c1q tumor necrosis factor-related protein 7 + F792 |
| 1763 | 13994325 | putative b,b-carotene-9′, 10′-dioxygenase |
| 1764 | 14017783 | Unknown |
| 1765 | 14017783 | Unknown |
| 1766 | 14017807 | Unknown |
| 1767 | 14017833 | Unknown |
| 1768 | 14017865 | Unknown |
| 1769 | 14017899 | Unknown |
| 1770 | 14017903 | Unknown |
| 1771 | 14017903 | Unknown |
| 1772 | 14017923 | Unknown |
| 1773 | 14017941 | Unknown |
| 1774 | 14017943 | Unknown |
| 1775 | 14017949 | Unknown |
| 1776 | 14017957 | Unknown |
| 1777 | 14017971 | Unknown |
| 1778 | 14028389 | mitochondrial ribosomal protein L41 |
| 1779 | 14028403 | mitochondrial ribosomal protein S28 |
| 1780 | 14028405 | mitochondrial ribosomal protein S29 |
| 1781 | 14028875 | UDP-glucuronic acid/UDP-N-acetylgalactosamine dual transporter; |
| | | KIAA0260 protein; UDP-glucuronic acid/UDP-N-acetylgalactosamine dual |
| | | transporter |
| 1782 | 14028877 | mitochondrial ribosomal protein S25; mitochondrial 28S ribosomal protein |
| | | S25 |
| 1783 | 14041699 | ESTRADIOL 17 BETA-DEHYDROGENASE 8 |
| 1784 | 14041874 | MAPKK like protein kinase/PDZ-binding kinase |
| 1785 | 14041889 | Unknown |
| 1786 | 14041976 | Unknown |
| 1787 | 14041978 | CDA02 protein |
| 1788 | 14041989 | Unknown |
| 1789 | 14042018 | Unknown |
| 1790 | 14042066 | Unknown |
| 1791 | 14042110 | Unknown |
| 1792 | 14042216 | Unknown |
| 1793 | 14042323 | Unknown |
| 1794 | 14042336 | Unknown |
| 1795 | 14042441 | Unknown |
| 1796 | 14042814 | Unknown |
| 1797 | 14042822 | Unknown |
| 1798 | 14042850 | Unknown |
| 1799 | 14042923 | chromosome 9 open reading frame 5 |
| 1800 | 14043187 | aldehyde dehydrogenase 4 A1 |
| 1801 | 14043217 | plectin 1, intermediate filament bindi |
| 1802 | 14043281 | leucine-rich neuronal protein |
| 1803 | 14043412 | Unknown |
| 1804 | 14043451 | succinyl-CoA synthetase beta subunit GTP-specific |
| 1805 | 14043654 | phosphofructokinase, muscle, similar to |
| 1806 | 14043666 | Unknown |
| 1807 | 14043738 | Unknown |
| 1808 | 14124942 | ribophorin I, similar to |
| 1809 | 14124976 | kinesin family member C3 |
| 1810 | 14133213 | Unknown |
| 1811 | 14133215 | Unknown |
| 1812 | 14133217 | Unknown |
| 1813 | 14133235 | Unknown |
| 1814 | 14141157 | heterogeneous nuclear ribonucleoprotein H3, isoform a |
| 1815 | 14149607 | chloride channel 7; CIC-7 |
| 1816 | 14149625 | ND 20 k |
| 1817 | 14149649 | siah binding protein 1; FBP interacting repressor; pyrimidine tract binding |
| | | splicing factor; Ro ribonucleoprotein-binding protein 1 |
| 1818 | 14149677 | lectomedin-3 |
| 1819 | 14149686 | Unknown |
| 1820 | 14149690 | Unknown |
| 1821 | 14149769 | GAJ protein |
| 1822 | 14149789 | Unknown |
| 1823 | 14149904 | tumor endothelial marker 8, isoform 1 precursor; anthrax toxin receptor |
| 1824 | 14149971 | Unknown |
| 1825 | 14150001 | Unknown |
| 1826 | 14150017 | Unknown |
| 1827 | 14150039 | Unknown |
| 1828 | 14150062 | Unknown |
| 1829 | 14150072 | Unknown |
| 1830 | 14150072 | Unknown |
| 1831 | 14150080 | Unknown |
| 1832 | 14150116 | Unknown |
| 1833 | 14150128 | phosphodiesterase 5A |
| 1834 | 14150134 | Unknown |
| 1835 | 14150155 | Unknown |
| 1836 | 14165260 | Unknown |
| 1837 | 14165270 | mitochondrial ribosomal protein L13 |
| 1838 | 14192943 | MEGF10 protein |
| 1839 | 14194461 | A kinase anchor protein 9 |
| 1840 | 14196457 | protocadherin gamma subfamily A, 12, isoform 2 precursor; cadherin 21; |
| | | fibroblast cadherin FIB3 |
| 1841 | 14196465 | protocadherin gamma subfamily A, 3, isoform 2 precursor |
| 1842 | 14198176 | ND 51 k |
| 1843 | 14198272 | Bcl-XL-binding protein v68, similar to |
| 1844 | 14198303 | Unknown |
| 1845 | 14211536 | neurexin 2; neurexin II |
| 1846 | 14211570 | conserved ERA-like GTPase |
| 1847 | 14211720 | desmuslin |
| 1848 | 14211857 | Unknown |
| 1849 | 14211903 | ubiquitin specific protease |
| 1850 | 14211907 | zinc finger protein 347; zinc finger 1111 |
| 1851 | 14211923 | PKCI-1-related HIT protein |
| 1852 | 14211939 | methylmalonyl-CoA epimerase |
| 1853 | 14248761 | cAMP-specific cyclic nucleotide phosphodiesterase |
| 1854 | 14249144 | RAB11B, member RAS oncogene family |
| 1855 | 14249338 | Unknown |
| 1856 | 14249342 | internexin neuronal intermediate filament protein, alpha; neurofilament 5 |
| | | (66 kD); neurofilament-66, tax-binding protein |
| 1857 | 14249376 | Unknown |
| 1858 | 14249428 | Unknown |
| 1859 | 14249446 | Unknown |
| 1860 | 14249454 | Unknown |
| 1861 | 14249474 | Unknown |
| 1862 | 14249506 | Unknown |
| 1863 | 14249588 | lactamase, beta |
| 1864 | 14249596 | Unknown |
| 1865 | 14249620 | Unknown |
| 1866 | 14249967 | staufenhomolog 2 |
| 1867 | 14250063 | peroxiredoxin 3 |
| 1868 | 14250110 | Unknown |
| 1869 | 14250319 | Unknown |
| 1870 | 14250458 | stromal cell derived factor 5, similar to |
| 1871 | 14250628 | Unknown |
| 1872 | 14250744 | Unknown |
| 1873 | 14251209 | chloride intracellular channel 1 |
| 1874 | 14269578 | metallothionein IV |
| 1875 | 14277739 | Erythrocyte Band-3 Protein, Crystal Structure Of The Cytoplasmic Domain |
| | | Of Human |
| 1876 | 14280050 | Vps39/Vam6-like protein |
| 1877 | 14285174 | elongation factor G |
| 1878 | 14286186 | ZINC FINGER PROTEIN 185(P1-A) g |
| 1879 | 14286294 | Unknown |
| 1880 | 14289323 | LIP isoform of BLIP |
| 1881 | 14318622 | Unknown |
| 1882 | 14329511 | bA430M15.1 (novel protein (ortholog of rat four repeat ion channel)) |
| 1883 | 14329531 | Unknown |
| 1884 | 14336727 | Unknown |
| 1885 | 14336768 | Unknown |
| 1886 | 14336775 | ND PDSW |
| 1887 | 14349362 | major histocompatibility complex, class I, F |
| 1888 | 14424013 | WNT-5B protein precursor |
| 1889 | 14424776 | Unknown |
| 1890 | 14485049 | T-cell receptor V delta 1 |
| 1891 | 14488680 | Phosphoglucose IsomeraseNEUROLEUKINAUTOCRINE MOTILITY |
| | | FACTORMATURATION Factor |
| 1892 | 14530763 | citrate lyase, similar to |
| 1893 | 14549163 | Matrilin-2 precursor |
| 1894 | 14571713 | tonicity-responsive enhancer binding protein |
| 1895 | 14575679 | hemicentin |
| 1896 | 14602477 | DNA-BINDING PROTEIN A |
| 1897 | 14602507 | Unknown |
| 1898 | 14602841 | cysteine string protein 1 |
| 1899 | 14602856 | Unknown |
| 1900 | 14602907 | Unknown |
| 1901 | 14602977 | Unknown |
| 1902 | 14603084 | putative DNA binding protein |
| 1903 | 14603309 | heat shock 60 kD MITOCHONDRIAL |
| 1904 | 14603403 | stomatin-like 2 |
| 1905 | 14670360 | zinc finger protein 278, long C isoform; POZ-AT hook-zinc finger protein |
| 1906 | 14714447 | sorting nexin 7 |
| 1907 | 14714514 | DIHYDROLIPOAMIDE DEHYDROGENASE-BINDING PROTEIN OF |
| | | PYRUVATE DEHYDROGENASE COMPLEX |
| 1908 | 14714528 | Unknown |
| 1909 | 14715007 | Unknown |
| 1910 | 14719392 | cofilin 2 |
| 1911 | 14720172 | Unknown |
| 1912 | 14720558 | succinate dehydrogenase, flavoprotein subunit |
| 1913 | 14721241 | low density lipoprotein-related protein-associated protein 1 |
| 1914 | 14721350 | testicular protein kinase 2 |
| 1915 | 14721365 | hypothetical protein, estradiol-induced |
| 1916 | 14721507 | serine/threonine kinase 18 |
| 1917 | 14721966 | Unknown |
| 1918 | 14722003 | cadherin 12, type 2 |
| 1919 | 14722193 | 3-hydroxybutyrate dehydrogenase |
| 1920 | 14722283 | Unknown |
| 1921 | 14722554 | Unknown |
| 1922 | 14722589 | mitochondrial ribosomal protein L22 |
| 1923 | 14722898 | mitochondrial ribosomal protein S27 |
| 1924 | 14723145 | acid phosphatase 1 isoform b |
| 1925 | 14723407 | Unknown |
| 1926 | 14723451 | mitochondrial ribosomal protein L20 |
| 1927 | 14723531 | p25 |
| 1928 | 14724042 | ASB-3 protein |
| 1929 | 14724206 | Unknown |
| 1930 | 14724379 | Unknown |
| 1931 | 14724557 | phosphatidylinositol glycan, class K |
| 1932 | 14724575 | Unknown |
| 1933 | 14724751 | phosphorylase, glycogen; brain |
| 1934 | 14724805 | Unknown |
| 1935 | 14725181 | lymphocyte antigen 75 |
| 1936 | 14725399 | TNF-induced protein |
| 1937 | 14725420 | syntaxin 12 |
| 1938 | 14725545 | RNA-binding protein regulatory subunit |
| 1939 | 14725791 | Unknown |
| 1940 | 14725848 | acyl-Coenzyme A dehydrogenase, C-4 to C-12 straight chain |
| 1941 | 14726372 | Unknown |
| 1942 | 14726632 | Unknown |
| 1943 | 14726693 | Unknown |
| 1944 | 14726725 | Unknown |
| 1945 | 14726866 | Unknown |
| 1946 | 14727174 | leucine-rich PPR-motif containing |
| 1947 | 14727486 | succinate dehydrogenase, subunit D |
| 1948 | 14727827 | Unknown |
| 1949 | 14728081 | excision repair cross-complementing rodent repair deficiency |
| 1950 | 14728229 | phosphoinositide-3-kinase, regulatory subunit 4, p150 |
| 1951 | 14728316 | natural killer cell receptor 2B4 |
| 1952 | 14728439 | Unknown |
| 1953 | 14728817 | Unknown |
| 1954 | 14728839 | Unknown |
| 1955 | 14728858 | sterol carrier protein 2 |
| 1956 | 14728945 | DMRT-like family B with proline-rich C-terminal, 1 |
| 1957 | 14729172 | elastin microfibril interface located protein |
| 1958 | 14729475 | BCL9 |
| 1959 | 14729487 | mast cell carboxypeptidase A3 precursor |
| 1960 | 14729783 | dihydrolipoamide branched chain transacylase |
| 1961 | 14730158 | TATA element modulatory factor 1 |
| 1962 | 14730499 | Unknown |
| 1963 | 14730569 | adenylate cyclase 3 |
| 1964 | 14730600 | Unknown |
| 1965 | 14730775 | hydroxyacyl-Coenzyme A dehydrogenase/3-ketoacyl-Coenzyme A |
| | | thiolase/enoyl-Coenzyme A hydratase alpha |
| 1966 | 14730782 | kinesin heavy chain member 2 |
| 1967 | 14732014 | Unknown |
| 1968 | 14732481 | calcium channel, voltage-dependent, alpha 1E subunit |
| 1969 | 14732525 | selective LIM binding factor, rat homolog |
| 1970 | 14732721 | adenomatosis polyposis coli |
| 1971 | 14732789 | mitofilin |
| 1972 | 14732886 | thyroid hormone receptor-associated protein, 150 kDa subunit |
| 1973 | 14733183 | adaptor-related protein complex 2, mu 1 subunit |
| 1974 | 14733451 | enkephalinase |
| 1975 | 14733480 | Unknown |
| 1976 | 14733532 | myofibrillogenesis regulator MR-1 |
| 1977 | 14733712 | chondroitin sulfate proteoglycan 2 |
| 1978 | 14733904 | serine/threonine kinase 16 |
| 1979 | 14734022 | Unknown |
| 1980 | 14734151 | lymphoid enhancer binding factor-1 |
| 1981 | 14734205 | Unknown |
| 1982 | 14734243 | Unknown |
| 1983 | 14734441 | Unknown |
| 1984 | 14734746 | DEAD/Hbox polypeptide 1 |
| 1985 | 14734864 | SWI/SNF related, matrix associated, actin dependent regulator of |
| | | chromatin, subfamily a-like 1 |
| 1986 | 14735060 | mitochondrial isoleucine tRNA synthetase |
| 1987 | 14735128 | Ste-20 related kinase |
| 1988 | 14735161 | BCL6 |
| 1989 | 14735336 | Unknown |
| 1990 | 14735426 | nuclear factor, interleukin 3 regulated |
| 1991 | 14735687 | Unknown |
| 1992 | 14735741 | Unknown |
| 1993 | 14735899 | cytochrome b5 reductase 1 |
| 1994 | 14736223 | UCR 1 |
| 1995 | 14736227 | Rho-associated, coiled-coil containing protein kinase 2 |
| 1996 | 14736267 | protein disulfide isomerase-related protein |
| 1997 | 14736397 | Unknown |
| 1998 | 14736560 | Unknown |
| 1999 | 14736612 | Unknown |
| 2000 | 14736678 | lactotransferrin |
| 2001 | 14736760 | voltage-dependent anion channel 2 |
| 2002 | 14736866 | DnaJhomolog, subfamily B, member 12 |
| 2003 | 14737445 | sema domain, immunoglobulin domain (lg), short basic domain, |
| 2004 | 14737746 | myeloid differentiation primary response gene |
| 2005 | 14737907 | Unknown |
| 2006 | 14738004 | Unknown |
| 2007 | 14738099 | Apobec-1 complementation factor; APOBEC-1 stimulating protein |
| 2008 | 14738103 | annexin IV |
| 2009 | 14738306 | putative, similar to |
| 2010 | 14738689 | Unknown |
| 2011 | 14738950 | Unknown |
| 2012 | 14739002 | Unknown |
| 2013 | 14739106 | Unknown |
| 2014 | 14739392 | Unknown |
| 2015 | 14739472 | potassium voltage-gated channel, shaker-related subfamily |
| 2016 | 14739880 | Unknown |
| 2017 | 14740316 | HEAT SHOCK 27 KDA PROTEIN (HSP 27) (STRESS-RESPONSIVE |
| | | PROTEIN 27) (SRP27) (ESTROGEN-REGULATED 24 KDA PROTEIN) |
| | | (28 KDA HEAT SHOCK PROTEIN), similar to |
| 2018 | 14740371 | A kinase anchor protein 2 |
| 2019 | 14740403 | thioredoxin |
| 2020 | 14740476 | TAF2 RNA polymerase II, TATA box binding protein (TBP)-associated |
| | | factor, 150 kD |
| 2021 | 14740547 | FUMARATE HYDRATASE, MITOCHONDRIAL PRECURSOR |
| | | (FUMARASE) |
| 2022 | 14740792 | v-ral simian leukemia viral oncogene homolog A (ras related) |
| 2023 | 14740886 | Unknown |
| 2024 | 14741177 | Unknown |
| 2025 | 14741234 | Unknown |
| 2026 | 14741376 | Fas-activated serine/threonine kinase, isoform 2 |
| 2027 | 14741510 | Unknown |
| 2028 | 14741555 | Unknown |
| 2029 | 14741636 | Unknown |
| 2030 | 14741782 | uncharacterized hematopoietic stem/progenitor cells protein MDSO |
| 2031 | 14742266 | RNA helicase |
| 2032 | 14742273 | Unknown |
| 2033 | 14742317 | Unknown |
| 2034 | 14742600 | vimentin |
| 2035 | 14742688 | diphthamide biosynthesis-like protein 2 |
| 2036 | 14742977 | inter-alphainhibitor, H2 polypeptide |
| 2037 | 14743031 | Unknown |
| 2038 | 14743873 | TAR (HIV) RNA binding protein 1 |
| 2039 | 14744078 | gamma filamin |
| 2040 | 14744132 | heat shock 70 kD protein 5 (glucose-regulated protein, 78 kD) |
| 2041 | 14744234 | nuclear receptor subfamily 6, group A, member 1, isoform 1 |
| 2042 | 14744290 | Hermansky-Pudlak syndrome protein |
| 2043 | 14744642 | Unknown |
| 2044 | 14744702 | rat myomegalin, similar to |
| 2045 | 14745217 | lipocalin 2 (oncogene 24p3) |
| 2046 | 14745424 | spectrin, alpha, non-erythrocytic 1 (alpha-fodrin) |
| 2047 | 14745489 | wingless-type MMTV integration site family, member 3A |
| 2048 | 14745808 | guanine nucleotide binding proteinalpha 12 |
| 2049 | 14745853 | Z-band alternatively spliced PDZ-motif |
| 2050 | 14745861 | Z-band alternatively spliced PDZ-motif |
| 2051 | 14745865 | Unknown |
| 2052 | 14746475 | Unknown |
| 2053 | 14746487 | ACYL-COA DEHYDROGENASE, VERY-LONG-CHAIN SPECIFIC + F36, |
| | | similar to |
| 2054 | 14746491 | Unknown |
| 2055 | 14746535 | RAB7, member RAS oncogene family |
| 2056 | 14746585 | yeast adenylate cyclase, similar to |
| 2057 | 14747216 | carrier aralar |
| 2058 | 14747249 | CGI-135 protein |
| 2059 | 14747260 | serologically defined colon cancer antigen 1 |
| 2060 | 14747375 | lysophospholipase I |
| 2061 | 14747970 | Unknown |
| 2062 | 14748292 | Unknown |
| 2063 | 14748400 | Unknown |
| 2064 | 14748439 | Unknown |
| 2065 | 14748831 | Unknown |
| 2066 | 14748858 | transformation/transcription domain-associated protein |
| 2067 | 14749079 | vacuolar protein sorting protein 18 |
| 2068 | 14749154 | Unknown |
| 2069 | 14749213 | serine-threonine kinase/MAD3-like protein kinase |
| 2070 | 14749294 | GCN2 elF2alpha kinase |
| 2071 | 14749361 | Unknown |
| 2072 | 14749419 | Unknown |
| 2073 | 14749523 | Unknown |
| 2074 | 14749588 | Unknown |
| 2075 | 14749765 | A kinase anchor protein 6 |
| 2076 | 14749776 | Unknown |
| 2077 | 14750136 | Unknown |
| 2078 | 14750148 | Unknown |
| 2079 | 14750186 | LAMIN A/C (70 KDA LAMIN) |
| 2080 | 14750222 | Unknown |
| 2081 | 14750259 | Rho/Rac guanine nucleotide exchange factor 2 |
| 2082 | 14750405 | pyruvate kinase, muscle (H. sapiens), similar to |
| 2083 | 14751203 | Unknown |
| 2084 | 14751493 | N-acylsphingosine amidohydrolase |
| 2085 | 14751551 | Unknown |
| 2086 | 14751705 | Unknown |
| 2087 | 14751808 | purine nucleoside phosphorylase |
| 2088 | 14751866 | IGF-II mRNA-binding protein 3 |
| 2089 | 14752024 | carrier aralar2 |
| 2090 | 14752229 | dihydrolipoamide dehydrogenase |
| 2091 | 14752236 | Unknown |
| 2092 | 14752239 | laminin, beta 1 precursor |
| 2093 | 14752249 | spectrin, beta, erythrocytic (includes spherocytosis, clinical type I) |
| 2094 | 14752728 | guanine nucleotide exchange factor Lbc or A-kinase anchoring protein |
| 2095 | 14753117 | Unknown |
| 2096 | 14753239 | kinectin 1 |
| 2097 | 14753384 | A kinase (PRKA) anchor protein (gravin) 12 |
| 2098 | 14753693 | adaptor-related protein complex 4, sigma 1 subunit, similar to |
| 2099 | 14753915 | Ras protein-specific guanine nucleotide-releasing factor 1 |
| 2100 | 14754222 | farnesol receptor HRR-1 |
| 2101 | 14754627 | Unknown |
| 2102 | 14754848 | Unknown |
| 2103 | 14754867 | Unknown |
| 2104 | 14755192 | Unknown |
| 2105 | 14755316 | zinc finger protein 91 |
| 2106 | 14755336 | tumor rejection antigen 1 |
| 2107 | 14755347 | Unknown |
| 2108 | 14755357 | mitochondrial ribosomal protein L18 |
| 2109 | 14755436 | superoxide dismutase 2, mitochondrial |
| 2110 | 14755456 | zinc finger protein 256 |
| 2111 | 14755952 | lysophospholipase I, similar to |
| 2112 | 14756295 | Na, K-ATPase subunit alpha 3 |
| 2113 | 14756299 | pot. ORF (1013 AA), similar to |
| 2114 | 14756626 | DNA (cytosine-5)-methyltransferase |
| 2115 | 14756630 | mitochondrial ribosomal protein L4 |
| 2116 | 14756895 | dUTP pyrophosphatase |
| 2117 | 14756939 | Unknown |
| 2118 | 14756944 | Unknown |
| 2119 | 14757147 | Unknown |
| 2120 | 14757210 | FSH primary responsehomolog 1 |
| 2121 | 14757677 | phosphoglycerate kinase 1 |
| 2122 | 14757711 | Unknown |
| 2123 | 14758001 | ND 24K NADH dehydrogenase (ubiquinone) flavoprotein 2 (24 kD) (H. |
| | | sapiens), similar to |
| 2124 | 14758520 | ATPase, Cu++ transporting, beta polypeptide (Wilson disease) |
| 2125 | 14759302 | golgi autoantigen, golgin subfamily a, 3 |
| 2126 | 14759459 | hook2 protein |
| 2127 | 14759609 | Unknown |
| 2128 | 14759903 | transcription factor |
| 2129 | 14759981 | Unknown |
| 2130 | 14760649 | inositol 1,4,5-triphosphate receptor, type 2 |
| 2131 | 14761208 | glyceraldehyde 3-phosphate dehydrogenase like |
| 2132 | 14761398 | tubulin beta 5, similar to |
| 2133 | 14761496 | programmed cell death 8 (apoptosis-inducing factor) |
| 2134 | 14761689 | calcium channel, voltage-dependent, beta 3 subunit |
| 2135 | 14762250 | protein tyrosine phosphatase, receptor type, B |
| 2136 | 14762650 | Unknown |
| 2137 | 14762696 | granzyme M precursor |
| 2138 | 14763105 | Unknown |
| 2139 | 14763304 | src homology 2 domain-containing transforming protein D, similar to |
| 2140 | 14763427 | death-associated protein kinase 3, ZIP-kinase |
| 2141 | 14763491 | NY-REN-58 antigen |
| 2142 | 14763709 | Unknown |
| 2143 | 14763948 | FERM, RhoGEF, and pleckstrin domain protein 1; chondrocyte-derived |
| | | ezrin-like protein, similar to |
| 2144 | 14764159 | acetyl-Coenzyme A acyltransferase 2 (mitochondrial 3-oxoacyl- |
| | | CoenzymeA thiolase) |
| 2145 | 14764202 | hydroxyacyl-Coenzyme A dehydrogenase, type II |
| 2146 | 14764412 | D-amino-acid oxidase |
| 2147 | 14764458 | male-specific lethal-3 (Drosophila)-like 1 |
| 2148 | 14764705 | Unknown |
| 2149 | 14764874 | Unknown |
| 2150 | 14764936 | G protein-coupled receptor 19 |
| 2151 | 14765579 | Unknown |
| 2152 | 14765581 | peroxiredoxin 5 |
| 2153 | 14765684 | kinesin family member 4 |
| 2154 | 14766197 | Unknown |
| 2155 | 14766265 | Unknown |
| 2156 | 14766346 | glutathione S-transferase P1-1 |
| 2157 | 14766373 | regulatory factor X, 4 |
| 2158 | 14766393 | transmembrane protein (63 kD), endoplasmic reticulum/Golgi |
| 2159 | 14766635 | prohibitin, B-cell associated protein |
| 2160 | 14766937 | DRIM protein or Key-1A6 protein |
| 2161 | 14767036 | Unknown |
| 2162 | 14767224 | protein kinase C and casein kinase substrate |
| 2163 | 14767305 | protein C, cardiac |
| 2164 | 14767738 | CALCIUM ATPASE 2(SERCA2) |
| 2165 | 14767795 | Unknown |
| 2166 | 14768227 | purinergic receptor P2X, ligand-gated ion channel, 7 |
| 2167 | 14768743 | thioredoxin peroxidase |
| 2168 | 14769051 | ND B14.5a |
| 2169 | 14769064 | Unknown |
| 2170 | 14769085 | Unknown |
| 2171 | 14769089 | Unknown |
| 2172 | 14769268 | GalNAc alpha-2, 6-sialyltransferase I, long form |
| 2173 | 14769776 | peripheral benzodiazepine receptor-associated protein 1 |
| 2174 | 14770042 | Unknown |
| 2175 | 14770070 | Unknown |
| 2176 | 14770170 | Unknown |
| 2177 | 14770383 | Unknown |
| 2178 | 14770569 | Unknown |
| 2179 | 14770608 | small fragment nuclease |
| 2180 | 14770670 | Unknown |
| 2181 | 14770915 | Unknown |
| 2182 | 14770940 | angiotensin I converting enzyme |
| 2183 | 14770968 | Unknown |
| 2184 | 14771355 | beta-2-glycoprotein I precursor |
| 2185 | 14771369 | brain-immunoglobulin-like molecule with tyrosine-based activation motifs |
| 2186 | 14771396 | isocitrate dehydrogenase 3 beta (NAD+) |
| 2187 | 14771416 | murine retrovirus integration site 1 homolog |
| 2188 | 14771689 | myosin, heavy polypeptide 1, skeletal muscle, adult |
| 2189 | 14772046 | Unknown |
| 2190 | 14772333 | phosphorylase, glycogen; brain (H. sapiens), similar to |
| 2191 | 14772527 | Unknown |
| 2192 | 14772555 | Unknown |
| 2193 | 14772672 | calpain 5 |
| 2194 | 14772954 | copine I |
| 2195 | 14773504 | tyrosine kinase, non-receptor, 1 |
| 2196 | 14773592 | AHNAK nucleoprotein (desmoyokin) |
| 2197 | 14773948 | Unknown |
| 2198 | 14774045 | Unknown |
| 2199 | 14774139 | ATPase g |
| 2200 | 14774236 | Unknown |
| 2201 | 14774282 | apolipoprotein A-I precursor |
| 2202 | 14774359 | ionotropic ATP receptor P2X5b |
| 2203 | 14774503 | phospholipase D2 |
| 2204 | 14774525 | carrier oxoglutarate |
| 2205 | 14774778 | Unknown |
| 2206 | 14774780 | karyopherin (importin) beta 1 |
| 2207 | 14774844 | succinate dehydrogenase, subunit C |
| 2208 | 14775218 | Unknown |
| 2209 | 14775320 | Unknown |
| 2210 | 14775363 | baculoviral IAP repeat-containing protein 5 |
| 2211 | 14775444 | carbohydrate (N-acetylglucosamine 6-O) sulfotransferase 5, similar to |
| 2212 | 14775476 | endocytic receptor (macrophage mannose receptor family) |
| 2213 | 14775546 | malonyl-CoA decarboxylase |
| 2214 | 14775827 | ubiquinol-cytochrome c reductase core protein II |
| 2215 | 14775827 | UCR 2 |
| 2216 | 14776296 | Unknown |
| 2217 | 14776472 | nuclear receptor co-repressor 1 |
| 2218 | 14776681 | Unknown |
| 2219 | 14776736 | Unknown |
| 2220 | 14776778 | ATP-binding cassette, sub-family A member 3 |
| 2221 | 14776800 | cat eye syndrome chromosome region, candidate 5, isoform 1 |
| 2222 | 14776960 | Unknown |
| 2223 | 14776980 | carrier citrate transporter |
| 2224 | 14777215 | protein disulfide isomerase, pancreatic; protein disulfide isomerase, |
| | | similar to |
| 2225 | 14777313 | ND 13 k-B |
| 2226 | 14777483 | general transcription factor IIIC, polypeptide 1 (alpha subunit, 220 kD) |
| 2227 | 14777522 | Unknown |
| 2228 | 14777630 | AT-binding transcription factor 1 |
| 2229 | 14777716 | Unknown |
| 2230 | 14777813 | Unknown |
| 2231 | 14777901 | Unknown |
| 2232 | 14778035 | Unknown |
| 2233 | 14778104 | adaptor-related protein complex 1, beta 1 subunit |
| 2234 | 14778235 | Unknown |
| 2235 | 14778381 | eIF4E-transporter |
| 2236 | 14778431 | ret finger protein-like 2 |
| 2237 | 14778654 | THIOSULFATE SULFURTRANSFERASE (RHODANESE) |
| 2238 | 14779326 | Unknown |
| 2239 | 14779686 | Unknown |
| 2240 | 14779867 | N-acetylglucosamine-1-phosphodiester alpha-N-acetylglucosaminida |
| 2241 | 14779881 | periplakin |
| 2242 | 14779964 | Unknown |
| 2243 | 14780055 | protease, serine, 7 |
| 2244 | 14780117 | Unknown |
| 2245 | 14780193 | synaptojanin 1 |
| 2246 | 14780272 | intersectin 1 (SH3 domain protein) |
| 2247 | 14780668 | ES1 protein /KNP-I protein ?? (ThiJ/Pfpl family motif) |
| 2248 | 14780705 | phosphofructokinase, liver |
| 2249 | 14780857 | Unknown |
| 2250 | 14781094 | huntingtin |
| 2251 | 14781125 | quinoid dihydropteridine reductase (H. sapiens), similar to |
| 2252 | 14781245 | fatty-acid-Coenzyme A ligase, long-chain 6 |
| 2253 | 14781533 | Unknown |
| 2254 | 14781826 | receptor (TNFRSF)-interacting serine-threonine kinase 1 |
| 2255 | 14781890 | Unknown |
| 2256 | 14781979 | Unknown |
| 2257 | 14781989 | putative transcription factor/GTF2I repeat domain-containing 1, isoform 2 |
| 2258 | 14782063 | malate dehydrogenase 2, NAD (mitochondrial) |
| 2259 | 14782332 | HLA-B associated transcript-3, similar to |
| 2260 | 14782751 | Unknown |
| 2261 | 14782921 | protein kinase C and casein kinase substrate in neurons 1 |
| 2262 | 14782973 | tubby like protein 1 |
| 2263 | 14783011 | p38 mitogen-activated protein kinase |
| 2264 | 14783112 | Unknown |
| 2265 | 14783333 | supervillin, isoform 1 |
| 2266 | 14783455 | Unknown |
| 2267 | 14783504 | Unknown |
| 2268 | 14783675 | small GTP binding protein RAB6 isoform |
| 2269 | 14783738 | inositol polyphosphate phosphatase-like 1 |
| 2270 | 14784011 | Unknown |
| 2271 | 14784064 | mitogen-activated protein kinase kinase kinase 11 |
| 2272 | 14784122 | atrophin-1 |
| 2273 | 14784162 | Ubiquitin isopeptidase T |
| 2274 | 14784612 | Unknown |
| 2275 | 14784913 | EH-domain containing 4 |
| 2276 | 14785008 | Unknown |
| 2277 | 14785181 | microfibrillar-associated protein 1 |
| 2278 | 14785356 | Unknown |
| 2279 | 14785405 | polo (Drosophia)-like kinase |
| 2280 | 14785865 | Unknown |
| 2281 | 14785919 | copper containing amine oxidase 3 precursor; amine oxidase (copper- |
| | | containing); copper amine oxidase precursor; vascular adhesion protein 1; |
| | | vascular adhesion protein 1, similar to |
| 2282 | 14786231 | Unknown |
| 2283 | 14786366 | PAR-6 beta |
| 2284 | 14786394 | cytochrome P450, subfamily XXIV precursor |
| 2285 | 14786884 | Unknown |
| 2286 | 14787181 | CUB and sushi multiple domains protein 1 short form |
| 2287 | 14790190 | SMART/HDAC1 associated repressor protein |
| 2288 | 15012003 | Unknown |
| 2289 | 15012048 | HERV-H LTR-associating 3, similar to |
| 2290 | 15020655 | ATP/GTP-binding protein |
| 2291 | 15026974 | obscurin |
| 2292 | 15029619 | fracture callus 1 homolog |
| 2293 | 15029922 | Unknown |
| 2294 | 15030240 | ATPase alpha, H+ transporting, mitochondrial F1 complex, alpha subunit, |
| | | isoform 1, cardiac muscle, similar to |
| 2295 | 15041811 | Hermansky-Pudlak syndrome type-3 protein |
| 2296 | 15076827 | Pcph proto-oncogene protein |
| 2297 | 15079348 | angiotensinogen proteinase inhibitor, |
| 2298 | 15079392 | replication control protein 1 |
| 2299 | 15079408 | Unknown |
| 2300 | 15079735 | Unknown |
| 2301 | 15080291 | dipeptidyl peptidase 7+F206, similar to |
| 2302 | 15080429 | Unknown |
| 2303 | 15080454 | Unknown |
| 2304 | 15080499 | serineproteinase inhibitor, clade A (alpha-1 antiproteinase, antitrypsin), |
| | | member 1, similar to |
| 2305 | 15126735 | heat shock 27 kD protein 1, similar to |
| 2306 | 15147248 | putative breast epithelial stromal interaction protein |
| 2307 | 15147337 | progestin induced protein; ubiquitin-protein ligase [Homo sa |
| 2308 | 15149476 | arginyl-tRNA synthetase |
| 2309 | 15150811 | mitochondrial ribosomal protein S36 |
| 2310 | 15208648 | central cannabinoid receptor, isoform b; CB1 receptor; brain cannabinoid |
| | | receptor 1 |
| 2311 | 15213479 | putative DNA polymerase delta p38 subunit |
| 2312 | 15213542 | NSD1 |
| 2313 | 15214423 | Unknown |
| 2314 | 15214486 | Unknown |
| 2315 | 15214706 | Unknown |
| 2316 | 15215308 | dystroglycan 1, similar to |
| 2317 | 15227456 | ch-TOG protein from Homo sapiens [Arabidopsis tha |
| 2318 | 15277229 | Homologue to Drosophila photoreceptor protein calphotin |
| 2319 | 15277415 | scavenger receptor cysteine-rich type 1 protein M160 precursor |
| 2320 | 15277514 | Unknown |
| 2321 | 15278188 | Unknown |
| 2322 | 15281150 | unkempt (Drosophila)-like |
| 2323 | 15281837 | PX domain-containing protein kinase |
| 2324 | 15294558 | RAS-RELATED PROTEIN RAB-5A |
| 2325 | 15294560 | RAB5A, member RAS oncogene family |
| 2326 | 15294667 | bassoon (presynaptic cytomatrix protein) |
| 2327 | 15294817 | GalNAc-4-sulfotransferase 2 (H. sapiens), similar to |
| 2328 | 15295270 | MADhomolog 5 |
| 2329 | 15295351 | VDAC-1 |
| 2330 | 15295412 | Unknown |
| 2331 | 15295574 | laminin receptor1 |
| 2332 | 15295842 | Unknown |
| 2333 | 15296104 | optic atrophy 1 |
| 2334 | 15296351 | splicing factor 3b, subunit 1, 155 kD |
| 2335 | 15296762 | v-kit Hardy-Zuckerman 4 feline sarcoma viral oncogene homolog |
| 2336 | 15296824 | lipin 1 |
| 2337 | 15297926 | transforming growth factor, alpha |
| 2338 | 15298022 | mitochondrial ribosomal protein L53 |
| 2339 | 15299136 | Unknown |
| 2340 | 15299287 | Unknown |
| 2341 | 15299581 | Unknown |
| 2342 | 15299784 | glutamate receptor, metabotropic 1 |
| 2343 | 15299942 | Unknown |
| 2344 | 15300149 | modulator of transcription factor GATA-4 in cardiomyocytes |
| 2345 | 15301488 | SERINE/THREONINE PROTEIN KINASE 24(MST-3) |
| 2346 | 15302083 | CD2-associated protein |
| 2347 | 15302719 | Unknown |
| 2348 | 15302936 | citrate synthase precursor |
| 2349 | 15303880 | Glutamate receptor interacting protein |
| 2350 | 15304843 | Unknown |
| 2351 | 15304935 | destrin (actin depolymerizing factor) |
| 2352 | 15305404 | Unknown |
| 2353 | 15305472 | troponin I, cardiac |
| 2354 | 15305838 | ReIA-associated inhibitor |
| 2355 | 15306072 | transcriptional repressor NAC1 |
| 2356 | 15306753 | Unknown |
| 2357 | 15307117 | rho guanine nucleotide exchange factor 12 |
| 2358 | 15307634 | ND 23 k |
| 2359 | 15314651 | oxygen regulated protein |
| 2360 | 15318843 | aconitase 2, mitochondrial |
| 2361 | 15318933 | cytochrome b5 reductase |
| 2362 | 15321298 | Unknown |
| 2363 | 15321380 | v-erb-a avian erythroblastic leukemia viral oncogene homolog-like 4 |
| 2364 | 15321446 | Unknown |
| 2365 | 15341707 | Unknown |
| 2366 | 15375094 | RSK-like protein |
| 2367 | 15451842 | ADAM-TS disintegrin and metalloproteinase domain 19, isoform 1 |
| | | preproprotein; meltrin beta; metalloprotease-disintegrin meltrin beta |
| 2368 | 15451854 | midline 1, isoform beta; midline-1; zinc finger X and Y |
| 2369 | 15451916 | bone morphogenetic protein receptor, type II, isoform 1 precursor; type II |
| | | activin receptor-like kinase; serine/threonine kinase |
| 2370 | 15451923 | serologically defined colon cancer antigen 33 |
| 2371 | 15529996 | son of sevenless homolog 1 (Drosophila); son of sevenless (Drosophila) |
| | | homolog 1 |
| 2372 | 15530243 | villin 2 (ezrin), similar to |
| 2373 | 15530305 | Unknown |
| 2374 | 15553127 | hexokinase 2; hexokinase-2, muscle |
| 2375 | 15553137 | H2A-Bbd |
| 2376 | 15559225 | Unknown |
| 2377 | 15559303 | Unknown |
| 2378 | 15559516 | Unknown |
| 2379 | 15559753 | Unknown |
| 2380 | 15620821 | Unknown |
| 2381 | 15620841 | Unknown |
| 2382 | 15620853 | Unknown |
| 2383 | 15620867 | Unknown |
| 2384 | 15620879 | Unknown |
| 2385 | 15620927 | Unknown |
| 2386 | 15620933 | Unknown |
| 2387 | 15680004 | H2B histone family, member Q, similar to |
| 2388 | 15680171 | semaF cytoplasmic domain associated protein 3 |
| 2389 | 15718530 | POM121 membrane glycoprotein (rat homolog)-like 2 |
| 2390 | 15778991 | Unknown |
| 2391 | 15779080 | Unknown |
| 2392 | 15779126 | guanine nucleotide binding protein (G protein), a |
| 2393 | 15779156 | Unknown |
| 2394 | 15795410 | Unknown |
| 2395 | 15808373 | erythroid membrane-associated protein |
| 2396 | 15808607 | ATPase f F0 |
| 2397 | 15826629 | Peroxiredoxin 5 |
| 2398 | 15928608 | solute carrier family 25 (mitochondrial carrier; adenine nucleotide |
| | | translocator), member 5, similar to |
| 2399 | 15928907 | Unknown |
| 2400 | 15929030 | Unknown |
| 2401 | 15929352 | mitochondrial ribosomal protein L1 |
| 2402 | 15929856 | Unknown |
| 2403 | 15929892 | Unknown |
| 2404 | 15988268 | Myb-Domain Of Human Rap1 |
| 2405 | 15988350 | Lysozyme |
| 2406 | 15990494 | Unknown |
| 2407 | 15991827 | hexokinase 1, isoform HKI-R; brain form |
| 2408 | 15991829 | hexokinase 1, isoform HKI-ta/tb; brain form hexokinase |
| 2409 | 15991859 | Unknown |
| 2410 | 16033591 | SH2 domain-containing phosphatase anchor protein 2b |
| 2411 | 16041807 | Unknown |
| 2412 | 16156815 | Sec23-interacting protein p125 |
| 2413 | 16156952 | Unknown |
| 2414 | 16157047 | succinate dehydrogenase complex, subunit A, flavoprotein precursor |
| 2415 | 16157111 | progesterone membrane binding protein |
| 2416 | 16157253 | uridine 5 monophosphate hydrolase 1; pyrimidine 5-nucleotidase, similar |
| | | to |
| 2417 | 16157453 | Unknown |
| 2418 | 16157682 | IDN3 protein |
| 2419 | 16158005 | RNA-binding protein regulatory subunit |
| 2420 | 16158038 | putative, similar to |
| 2421 | 16158324 | heat shock 70 kD protein (Mortalin-2) |
| 2422 | 16158747 | CLIP-associating protein 2 |
| 2423 | 16159170 | Unknown |
| 2424 | 16159302 | Unknown |
| 2425 | 16159416 | Unknown |
| 2426 | 16159569 | Unknown |
| 2427 | 16159594 | carnitine palmitoyltransferase II |
| 2428 | 16159701 | ribosomal protein S7 (H. sapiens), similar to |
| 2429 | 16159788 | S100 calcium-binding protein A6 |
| 2430 | 16159874 | Unknown |
| 2431 | 16160276 | spectrin, beta, non-erythrocytic 1 (H. sapiens), similar to |
| 2432 | 16160441 | putative, similar to |
| 2433 | 16160793 | glycosyltransferase AD-017 |
| 2434 | 16160823 | phosphatidylinositol-4-phosphate 5-kinase, type I, beta |
| 2435 | 16160929 | retinoblastoma-binding protein 5 |
| 2436 | 16161569 | ryanodine receptor 2 |
| 2437 | 16161583 | endoplasmic reticulum oxidoreductin 1-Lbeta |
| 2438 | 16161627 | Rho guanine nucleotide exchange factor 10 |
| 2439 | 16161681 | Unknown |
| 2440 | 16161727 | stromal cell derived factor receptor 1 isoform a |
| 2441 | 16162032 | PEPTIDYL-PROLYL CIS-TRANS ISOMERASE B PRECURSOR |
| | | (PPIASE) (ROTAMASE) (CYCLOPHILIN B) |
| 2442 | 16163057 | Unknown |
| 2443 | 16163065 | RIKEN cDNA 2410008H17 gene, similar to |
| 2444 | 16163124 | TTF-I interacting peptide 20 |
| 2445 | 16163817 | Bcl 1 |
| 2446 | 16164710 | Unknown |
| 2447 | 16164895 | rabaptin-5 |
| 2448 | 16164980 | Unknown |
| 2449 | 16165190 | Unknown |
| 2450 | 16165554 | Unknown |
| 2451 | 16165872 | accessory proteins BAP31/BAP29 (H. sapiens), similar to |
| 2452 | 16166325 | Unknown |
| 2453 | 16166513 | pericentrin B |
| 2454 | 16168619 | Unknown |
| 2455 | 16171486 | Unknown |
| 2456 | 16171987 | monoamine oxidase A |
| 2457 | 16172349 | triadin |
| 2458 | 16174655 | Unknown |
| 2459 | 16175846 | atrophin-1 interacting protein 1; activin receptor interacting protein |
| 2460 | 16176937 | excision repair protein 1 |
| 2461 | 16177368 | putative, similar to |
| 2462 | 16177559 | MLL2 protein |
| 2463 | 16178062 | Unknown |
| 2464 | 16178117 | Unknown |
| 2465 | 16178214 | GTP-rho binding protein 1, similar to |
| 2466 | 16181084 | G protein-coupled receptor 51 |
| 2467 | 16192638 | isocitrate dehydrogenase 2 (NADP+), mitochondrial |
| 2468 | 16196598 | cox 6a |
| 2469 | 16198361 | Unknown |
| 2470 | 16198481 | Unknown |
| 2471 | 16306537 | cadherin 20, type 2 preproprotein |
| 2472 | 16306954 | Unknown |
| 2473 | 16306978 | annexin A2 |
| 2474 | 16307164 | CGI-90 protein |
| 2475 | 16307227 | Unknown |
| 2476 | 16307270 | Unknown |
| 2477 | 16307468 | Unknown |
| 2478 | 16307475 | neuroepithelial cell transforming gene 1 |
| 2479 | 16359102 | Unknown |
| 2480 | 16359195 | Unknown |
| 2481 | 16416451 | tRNA-nucleotidyltransferase |
| 2482 | 16418373 | Unknown |
| 2483 | 16418423 | guanylate binding protein 4 |
| 2484 | 16507813 | tumor necrosis factor receptor superfamily, member 21, similar to |
| 2485 | 16549125 | Unknown |
| 2486 | 16549199 | Unknown |
| 2487 | 16549271 | Unknown |
| 2488 | 16549294 | Unknown |
| 2489 | 16549620 | Unknown |
| 2490 | 16549880 | Unknown |
| 2491 | 16549918 | Unknown |
| 2492 | 16550394 | Unknown |
| 2493 | 16550518 | Unknown |
| 2494 | 16550576 | Unknown |
| 2495 | 16550810 | Unknown |
| 2496 | 16550845 | Unknown |
| 2497 | 16551173 | Unknown |
| 2498 | 16551429 | Unknown |
| 2499 | 16551580 | Unknown |
| 2500 | 16551610 | Unknown |
| 2501 | 16551739 | myosin light chain kinase |
| 2502 | 16551769 | Unknown |
| 2503 | 16551917 | Unknown |
| 2504 | 16551953 | Unknown |
| 2505 | 16551957 | Unknown |
| 2506 | 16552104 | Unknown |
| 2507 | 16552271 | Unknown |
| 2508 | 16552547 | Unknown |
| 2509 | 16552885 | Unknown |
| 2510 | 16552927 | Unknown |
| 2511 | 16552957 | Unknown |
| 2512 | 16552988 | Unknown |
| 2513 | 16553031 | Unknown |
| 2514 | 16553078 | Unknown |
| 2515 | 16553235 | Unknown |
| 2516 | 16553285 | Unknown |
| 2517 | 16553362 | Unknown |
| 2518 | 16554014 | Unknown |
| 2519 | 16554275 | Unknown |
| 2520 | 16554604 | mitochondrial ribosomal protein S23 |
| 2521 | 16554607 | mitochondrial ribosomal protein S10; NB4 apoptosis/differentiation related |
| | | protein; mitochondrial 28S ribosomal protein S10 |
| 2522 | 16741033 | protease 26S subunit, ATPase 1 |
| 2523 | 16753264 | Unknown |
| 2524 | 16876860 | Unknown |
| 2525 | 16877071 | ATPase gamma F1 |
| 2526 | 16877127 | synaptophysin-like protein, similar to |
| 2527 | 16877285 | duodenal cytochrome b, similar to |
| 2528 | 16877328 | Unknown |
| 2529 | 16877328 | Unknown |
| 2530 | 16877459 | Unknown |
| 2531 | 16877964 | isovaleryl Coenzyme A dehydrogenase |
| 2532 | 16878101 | Unknown |
| 2533 | 16924265 | Unknown |
| 2534 | 16924269 | Unknown |
| 2535 | 16950603 | mitochondrial ribosomal protein S35; mitochondrial 28S ribosomal protein |
| | | S28 |
| 2536 | 16950609 | mitochondrial ribosomal protein S27; mitochondrial 28S ribosomal protein |
| | | S27 |
| 2537 | 16974753 | sodium-potassium-chloride cotransporter |
| 2538 | 17016315 | olfactory receptor-like protein JCG4 |
| 2539 | 17028367 | gelsolin (amyloidosis, Finnish type), similar to |
| 2540 | 17028379 | Unknown |
| 2541 | 17375734 | Cyclin G-associated kinase |
| 2542 | 17378599 | Gamma-interferon-inducible protein Ifi-16 (Interferon-inducible myeloid |
| | | differentiation transcriptional activator) (IFI 16) |
| 2543 | 17380287 | Mitochondrial 39S ribosomal protein L56 (MRP-L56) (Serine beta |
| | | lactamase-like protein LACTB) |
| 2544 | 17380426 | Mannosyl-oligosaccharide 1,2-alpha-mannosidase IA (Processing alpha- |
| | | 1,2-mannosidase IA) (Alpha-1,2-mannosidase IA) (Mannosidase alpha |
| | | class 1A member 1) (Man(9)-alpha-mannosidase) (Man9-mannosidase) |
| 2545 | 17389971 | Unknown |
| 2546 | 17402865 | thiosulfate sulfurtransferase (rhodanese) |
| 2547 | 17432231 | MSTP022 |
| 2548 | 17434094 | putative, similar to |
| 2549 | 17434314 | Unknown |
| 2550 | 17434411 | Unknown |
| 2551 | 17434458 | Unknown |
| 2552 | 17434554 | Unknown |
| 2553 | 17434671 | Unknown |
| 2554 | 17435264 | INNER EAR-SPECIFIC COLLAGEN PRECURSOR (SACCULAR |
| | | COLLAGEN), similar to |
| 2555 | 17435299 | Unknown |
| 2556 | 17435748 | phosphorylase, glycogen; brain |
| 2557 | 17436258 | ND 13 K-B NADH dehydrogenase (ubiquinone) 1 alpha subcomplex, 5; |
| | | hypothetical protein FLJ12147; Complex I-13 KD-B; ubiquinone reductase; |
| | | type I dehydrogenase, similar to |
| 2558 | 17436498 | Unknown |
| 2559 | 17436513 | VDAC-1 VOLTAGE-DEPENDENT ANION-SELECTIVE CHANNEL |
| | | PROTEIN 1 (VDAC-1) (RVDAC1) (OUTER MITOCHONDRIAL |
| | | MEMBRANE PROTEIN PORIN 1), similar to |
| 2560 | 17436561 | Unknown |
| 2561 | 17436979 | Unknown |
| 2562 | 17437312 | Unknown |
| 2563 | 17438284 | Unknown |
| 2564 | 17439551 | REGULATOR OF G-PROTEIN SIGNALING 12 (RGS12), similar to |
| 2565 | 17440287 | anaplastic lymphoma kinase Ki-1, similar to |
| 2566 | 17442134 | one twenty two protein; hypothetical protein FLJ12479, similar to |
| 2567 | 17442500 | Molybdenum cofactor synthesis protein cinnamon, similar to |
| 2568 | 17442568 | Unknown |
| 2569 | 17443010 | hematological and neurological expressed sequence 1, similar to |
| 2570 | 17443439 | Unknown |
| 2571 | 17443833 | glyceraldehyde-3-phosphate dehydrogenase, similar to |
| 2572 | 17444067 | RIKEN cDNA 0610011N22, similar to |
| 2573 | 17444600 | Unknown |
| 2574 | 17444969 | solute carrier family 4, anion exchanger, member 3 |
| 2575 | 17445877 | xylulokinase homolog (H. influenzae) |
| 2576 | 17446038 | Unknown |
| 2577 | 17446807 | plastin 1 |
| 2578 | 17447126 | Unknown |
| 2579 | 17447383 | Unknown |
| 2580 | 17447877 | Unknown |
| 2581 | 17450039 | Unknown |
| 2582 | 17450491 | factor V, similar to |
| 2583 | 17451676 | putative, similar to |
| 2584 | 17451748 | Unknown |
| 2585 | 17451801 | Unknown |
| 2586 | 17452377 | Unknown |
| 2587 | 17454350 | putative protein, similar to |
| 2588 | 17454582 | phosphoglycerate mutase 1 (brain); Phosphoglycerate mutase A, |
| | | nonmuscle form, similar to |
| 2589 | 17455099 | putative, similar to |
| 2590 | 17455439 | heat shock 60 kD protein 1 (chaperonin) (H. sapiens), similar to |
| 2591 | 17455445 | Mitochondrial Complex I protein, now 21754001 |
| 2592 | 17455927 | Unknown |
| 2593 | 17456092 | Unknown |
| 2594 | 17456384 | non-specific cross reacting antigen, similar to |
| 2595 | 17457389 | Unknown |
| 2596 | 17458483 | Unknown |
| 2597 | 17458911 | Unknown |
| 2598 | 17459115 | Melanoma-associated antigen 11 (MAGE-11 antigen), similar to |
| 2599 | 17459319 | putative, similar to |
| 2600 | 17459408 | small Rho-like GTPase RhoA, similar to |
| 2601 | 17459479 | Unknown |
| 2602 | 17459746 | VOLTAGE-DEPENDENT ANION-SELECTIVE CHANNEL PROTEIN 2 |
| | | (OUTER MITOCHONDRIAL MEMBRANE PROTEIN PORIN 2), similar to |
| 2603 | 17460020 | Unknown |
| 2604 | 17460330 | Unknown |
| 2605 | 17460767 | Unknown |
| 2606 | 17460836 | testis expressed sequence 13A, similar to |
| 2607 | 17461025 | Unknown |
| 2608 | 17461670 | RIKEN cDNA 9430083G14, similar to |
| 2609 | 17462761 | Unknown |
| 2610 | 17463437 | Unknown |
| 2611 | 17464527 | match: multiple proteins; match: Q08151 P28185 Q01111 Q43554; |
| | | match: Q08150 Q40195 P20340 Q39222; match: Q40368 P36412 |
| | | P40393 Q40723; match: CE01798 Q38923 Q40191 Q41022; match: |
| | | Q39433 Q40177 Q40218 Q08146; match: P10949 P11023 Q, similar to |
| 2612 | 17464573 | Unknown |
| 2613 | 17464724 | eukaryotic translation elongation factor 1 alpha 1, similar to |
| 2614 | 17464807 | phosphoglycerate mutase 2 (muscle) |
| 2615 | 17464864 | Unknown |
| 2616 | 17465135 | v-raf murine sarcoma viral oncogene homolog B1 |
| 2617 | 17465213 | Unknown |
| 2618 | 17465562 | Unknown |
| 2619 | 17466365 | Unknown |
| 2620 | 17466818 | Unknown |
| 2621 | 17468096 | prohibitin, similar to |
| 2622 | 17468798 | Unknown |
| 2623 | 17469624 | Unknown |
| 2624 | 17470256 | Unknown |
| 2625 | 17470269 | chromosome 15 open reading frame 2, similar to |
| 2626 | 17470290 | Unknown |
| 2627 | 17471316 | Unknown |
| 2628 | 17471893 | Unknown |
| 2629 | 17472555 | Unknown |
| 2630 | 17472883 | ND 51K NADH dehydrogenase (ubiquinone) flavoprotein 1 (51 kD) |
| 2631 | 17474293 | midline 1; Finger on X and Y (in rat only on X), similar to |
| 2632 | 17474785 | VDAC-1 voltage-dependent anion channel 1, similar to |
| 2633 | 17475184 | Y39B6A.pp.p, similar to |
| 2634 | 17476245 | Unknown |
| 2635 | 17476469 | Unknown |
| 2636 | 17476471 | Unknown |
| 2637 | 17478738 | Unknown |
| 2638 | 17481443 | procollagen-proline, 2-oxoglutarate 4-dioxygenase (proline 4- |
| | | hydroxylase), beta polypeptide (protein disulfide isomerase; thyroid |
| | | hormone binding protein p55) |
| 2639 | 17481778 | Unknown |
| 2640 | 17482059 | Unknown |
| 2641 | 17482696 | Kruppel-type zinc finger (C2H2), similar to |
| 2642 | 17482910 | Unknown |
| 2643 | 17482953 | putative methyl-binding domain protein MBD105, similar to |
| 2644 | 17483121 | rhophilin-like protein (H. sapiens), similar to |
| 2645 | 17483187 | Unknown |
| 2646 | 17483399 | RAB11B, member RAS oncogene family |
| 2647 | 17483482 | Unknown |
| 2648 | 17484820 | acetyl-Coenzyme A synthetase 2 (AMP forming)-like |
| 2649 | 17484835 | Unknown |
| 2650 | 17485036 | Unknown |
| 2651 | 17485099 | Unknown |
| 2652 | 17485128 | Unknown |
| 2653 | 17485337 | Unknown |
| 2654 | 17485700 | Unknown |
| 2655 | 17485787 | Mitochondrial Acyl-CoA Thioesterase |
| 2656 | 17486071 | DKFZP434O047 protein, similar to |
| 2657 | 17486087 | Unknown |
| 2658 | 17486456 | Unknown |
| 2659 | 17486463 | Unknown |
| 2660 | 17486622 | Unknown |
| 2661 | 17486915 | Unknown |
| 2662 | 17487175 | dentin phosphoryn, similar to |
| 2663 | 17487390 | Unknown |
| 2664 | 17487672 | Unknown |
| 2665 | 17487733 | F40G9.9.p, similar to |
| 2666 | 17487809 | glyceraldehyde-3-phosphate dehydrogenase, similar to |
| 2667 | 17487981 | F4N2.10, similar to |
| 2668 | 17488153 | Unknown |
| 2669 | 17489631 | Unknown |
| 2670 | 17491107 | Unknown |
| 2671 | 17511874 | Unknown |
| 2672 | 17511976 | Unknown |
| 2673 | 17512080 | WAS protein family, member 1 |
| 2674 | 17512147 | Unknown |
| 2675 | 17736731 | mixed lineage kinase 4beta |
| 2676 | 17834080 | haymaker protein |
| 2677 | 17865554 | mitochondrial ribosomal protein L9, 60S mitochondrial precursor (L9 mt) |
| 2678 | 17939563 | Unknown |
| 2679 | 17943068 | Tcf-4 BETA-Catenin Complex |
| 2680 | 17943407 | Auh Protein, An Rna-Binding Homologue Of Enoyl-Coa Hydratase |
| 2681 | 17981863 | ND 5 |
| 2682 | 17985539 | ND 4 |
| 2683 | 18044194 | Unknown |
| 2684 | 18087815 | Unknown |
| 2685 | 18088572 | RIKEN cDNA 4930553C05 gene, similar to |
| 2686 | 18147097 | CG1800 gene product [Drosophila melanogaster] homolog |
| 2687 | 18157651 | bullous pemphigoid antigen 1 eA |
| 2688 | 18158416 | chromosome 20 open reading frame 188 protein; likely ortholog of mouse |
| | | transient receptor protein 4, associated protein |
| 2689 | 18201886 | chromosome 20 open reading frame 175 |
| 2690 | 18201913 | winged-helix nude |
| 2691 | 18204214 | Unknown |
| 2692 | 18204272 | Unknown |
| 2693 | 18252315 | propionyl-CoA carboxylase alpha subunit |
| 2694 | 18252778 | ankyrin repeat-containing protein ASB-2 |
| 2695 | 18490293 | ephrin B3, similar to |
| 2696 | 18490363 | calsequestrin 2 (cardiac muscle) |
| 2697 | 18490389 | Unknown |
| 2698 | 18490639 | Unknown |
| 2699 | 18543654 | Unknown |
| 2700 | 18543672 | Unknown |
| 2701 | 18544062 | Unknown |
| 2702 | 18544103 | transcription factor Dp-1, similar to |
| 2703 | 18544502 | Unknown |
| 2704 | 18545149 | SWI/SNF related, matrix associated, actin dependent regulator of |
| | | chromatin, subfamily f, member 1 (H. sapiens), similar to |
| 2705 | 18545197 | Unknown |
| 2706 | 18545286 | Unknown |
| 2707 | 18545525 | Unknown |
| 2708 | 18545711 | trithorax-related, similar to |
| 2709 | 18545867 | forkhead box D2 |
| 2710 | 18546369 | Unknown |
| 2711 | 18546495 | N-acetylglucosaminyltransferase VI, similar to |
| 2712 | 18547145 | Unknown |
| 2713 | 18547604 | Unknown |
| 2714 | 18547655 | Unknown |
| 2715 | 18547774 | PAPIN, similar to |
| 2716 | 18547995 | Unknown |
| 2717 | 18548319 | Unknown |
| 2718 | 18548686 | Unknown |
| 2719 | 18548841 | Unknown |
| 2720 | 18549011 | Unknown |
| 2721 | 18549603 | Unknown |
| 2722 | 18549721 | spectrin, alpha, erythrocytic 1 (elliptocytosis 2) |
| 2723 | 18549759 | Unknown |
| 2724 | 18550245 | Unknown |
| 2725 | 18550248 | dysferlin |
| 2726 | 18550356 | Unknown |
| 2727 | 18550688 | LWamide neuropeptide precursor protein, similar to |
| 2728 | 18551342 | laminin receptor 1; Laminin receptor-1 (67 kD); 67 kD, ribosomal protein |
| | | SA, similar to |
| 2729 | 18551404 | Unknown |
| 2730 | 18551428 | Unknown |
| 2731 | 18551530 | Unknown |
| 2732 | 18551750 | Unknown |
| 2733 | 18552428 | down-regulated by Ctnnb1, a, similar to |
| 2734 | 18552574 | heat shock 70 kD protein 9B (mortalin-2) (H. sapiens), similar to |
| 2735 | 18552843 | Unknown |
| 2736 | 18553054 | Unknown |
| 2737 | 18553524 | Unknown |
| 2738 | 18553646 | Unknown |
| 2739 | 18553709 | RIKEN cDNA 1810055D05 gene, similar to |
| 2740 | 18553922 | succinate dehydrogenase complex, subunit A, flavoprotein (Fp) (H. |
| | | sapiens) similar to |
| 2741 | 18554092 | Unknown |
| 2742 | 18554792 | Unknown |
| 2743 | 18554892 | protein phosphatase 4 regulatory subunit 2 (H. sapiens), similar to |
| 2744 | 18555498 | Unknown |
| 2745 | 18555697 | SALL1 (sal (Drosophila)-like, similar to |
| 2746 | 18555923 | Unknown |
| 2747 | 18556527 | protein tyrosine phosphatase, receptor type, G |
| 2748 | 18557013 | Unknown |
| 2749 | 18557341 | Unknown |
| 2750 | 18557515 | ring finger protein 23; RING-B box-coiled coil-B30.2, similar to |
| 2751 | 18557535 | Unknown |
| 2752 | 18557606 | Unknown |
| 2753 | 18557689 | Unknown |
| 2754 | 18558040 | Unknown |
| 2755 | 18558112 | C-terminal binding protein 1 (H. sapiens), similar to |
| 2756 | 18558130 | cyclin G associated kinase (H. sapiens), similar to |
| 2757 | 18558177 | Unknown |
| 2758 | 18558348 | Unknown |
| 2759 | 18558362 | Unknown |
| 2760 | 18558762 | Unknown |
| 2761 | 18559050 | Unknown |
| 2762 | 18559054 | Unknown |
| 2763 | 18559169 | GrpE-like protein cochaperone |
| 2764 | 18559889 | Unknown |
| 2765 | 18559896 | Unknown |
| 2766 | 18559969 | Unknown |
| 2767 | 18559997 | Unknown |
| 2768 | 18560088 | Unknown |
| 2769 | 18560396 | Unknown |
| 2770 | 18560536 | Unknown |
| 2771 | 18560871 | Unknown |
| 2772 | 18560910 | SGC32445 protein |
| 2773 | 18561153 | Unknown |
| 2774 | 18561225 | Unknown |
| 2775 | 18561342 | Unknown |
| 2776 | 18561850 | Unknown |
| 2777 | 18562164 | Unknown |
| 2778 | 18562264 | Unknown |
| 2779 | 18562403 | gag, similar to |
| 2780 | 18562447 | Unknown |
| 2781 | 18562613 | Unknown |
| 2782 | 18562676 | Unknown |
| 2783 | 18562743 | Unknown |
| 2784 | 18562778 | Unknown |
| 2785 | 18562814 | Unknown |
| 2786 | 18562826 | Unknown |
| 2787 | 18563024 | Unknown |
| 2788 | 18563079 | Unknown |
| 2789 | 18563446 | Unknown |
| 2790 | 18564249 | Unknown |
| 2791 | 18565200 | Unknown |
| 2792 | 18565553 | Unknown |
| 2793 | 18565735 | Unknown |
| 2794 | 18565792 | Unknown |
| 2795 | 18565965 | Unknown |
| 2796 | 18566008 | Unknown |
| 2797 | 18566051 | Unknown |
| 2798 | 18566469 | CDC14 cell division cycle 14 homolog B (S. cerevisiae) (H. sapiens), |
| | | similar to |
| 2799 | 18566582 | Unknown |
| 2800 | 18567546 | Unknown |
| 2801 | 18568015 | Unknown |
| 2802 | 18568092 | Unknown |
| 2803 | 18568100 | Unknown |
| 2804 | 18568732 | Unknown |
| 2805 | 18568834 | Unknown |
| 2806 | 18568892 | T-COMPLEX PROTEIN 1, GAMMA SUBUNIT (TCP-1-GAMMA) (CCT- |
| | | GAMMA), similar to |
| 2807 | 18568988 | Unknown |
| 2808 | 18569016 | Unknown |
| 2809 | 18569389 | Unknown |
| 2810 | 18569391 | Unknown |
| 2811 | 18569544 | Unknown |
| 2812 | 18569728 | Unknown |
| 2813 | 18569926 | Unknown |
| 2814 | 18570016 | Unknown |
| 2815 | 18570037 | Unknown |
| 2816 | 18571373 | Unknown |
| 2817 | 18571864 | Unknown |
| 2818 | 18572080 | tubulin, beta polypeptide 4, member Q (H. sapiens), similar to |
| 2819 | 18572219 | Unknown |
| 2820 | 18572532 | Unknown |
| 2821 | 18572576 | DKFZP434J193 protein (H. sapiens), similar to |
| 2822 | 18572752 | Unknown |
| 2823 | 18573432 | Unknown |
| 2824 | 18573604 | Unknown |
| 2825 | 18573884 | Sec24-related protein C |
| 2826 | 18574091 | (H. sapiens), similar to |
| 2827 | 18574564 | Unknown |
| 2828 | 18574897 | cathepsin L, similar to |
| 2829 | 18575014 | Unknown |
| 2830 | 18575020 | Unknown |
| 2831 | 18575034 | Unknown |
| 2832 | 18575353 | Unknown |
| 2833 | 18575792 | Unknown |
| 2834 | 18575881 | solute carrier family 9 (sodium/hydrogen exchanger), isoform 3, similar to |
| 2835 | 18575937 | Unknown |
| 2836 | 18576372 | Unknown |
| 2837 | 18576435 | glycoprotein beta-Gal 3′-sulfotransferase (H. sapiens), similar to |
| 2838 | 18576618 | Unknown |
| 2839 | 18576708 | Unknown |
| 2840 | 18576758 | Unknown |
| 2841 | 18576861 | Unknown |
| 2842 | 18577160 | Unknown |
| 2843 | 18577199 | suppression of tumorigenicity 5 |
| 2844 | 18577427 | Unknown |
| 2845 | 18577553 | Unknown |
| 2846 | 18577877 | glutamate receptor, metabotropic 5 (H. sapiens), similar to |
| 2847 | 18578024 | Unknown |
| 2848 | 18578981 | voltage gated potassium channel Kv3.2b, similar to |
| 2849 | 18579037 | glyceraldehyde-3-phosphate dehydrogenase, similar to |
| 2850 | 18579791 | Unknown |
| 2851 | 18580015 | Unknown |
| 2852 | 18580073 | Unknown |
| 2853 | 18580116 | solute carrier family 4, sodium bicarbonate cotransporter, member 8 (H. |
| | | sapiens), similar to |
| 2854 | 18580149 | Unknown |
| 2855 | 18580193 | Unknown |
| 2856 | 18580223 | Unknown |
| 2857 | 18580396 | Unknown |
| 2858 | 18580585 | Unknown |
| 2859 | 18580633 | phosphoinositide-3-kinase, class 2, gamma polypeptide |
| 2860 | 18581005 | Unknown |
| 2861 | 18581215 | Unknown |
| 2862 | 18581598 | Unknown |
| 2863 | 18581873 | Unknown |
| 2864 | 18582200 | Unknown |
| 2865 | 18582274 | Unknown |
| 2866 | 18582343 | Unknown |
| 2867 | 18582592 | Unknown |
| 2868 | 18582682 | CG9109 gene product, similar to |
| 2869 | 18582865 | Unknown |
| 2870 | 18583213 | Unknown |
| 2871 | 18583325 | Unknown |
| 2872 | 18583345 | Unknown |
| 2873 | 18583383 | Unknown |
| 2874 | 18583657 | Unknown |
| 2875 | 18583725 | multidomain presynaptic cytomatrix protein Piccolo, similar to |
| 2876 | 18583727 | Unknown |
| 2877 | 18584065 | Unknown |
| 2878 | 18584949 | Unknown |
| 2879 | 18585335 | Unknown |
| 2880 | 18585686 | Unknown |
| 2881 | 18586054 | Unknown |
| 2882 | 18586298 | Unknown |
| 2883 | 18586333 | splicing factor 3b, subunit 3, 130 kD |
| 2884 | 18586459 | putative, similar to |
| 2885 | 18586610 | Unknown |
| 2886 | 18587004 | Unknown |
| 2887 | 18587044 | Unknown |
| 2888 | 18587067 | Unknown |
| 2889 | 18587111 | Unknown |
| 2890 | 18587387 | Unknown |
| 2891 | 18587810 | arachidonate 12-lipoxygenase, 12R type (H. sapiens), similar to |
| 2892 | 18588235 | Unknown |
| 2893 | 18588450 | Unknown |
| 2894 | 18588517 | Unknown |
| 2895 | 18589035 | Unknown |
| 2896 | 18589065 | WW domain binding protein-2, similar to |
| 2897 | 18589260 | Unknown |
| 2898 | 18589408 | Unknown |
| 2899 | 18589876 | Unknown |
| 2900 | 18590023 | Unknown |
| 2901 | 18590390 | RNI-like protein, similar to |
| 2902 | 18590417 | Unknown |
| 2903 | 18590816 | Unknown |
| 2904 | 18591174 | Unknown |
| 2905 | 18591441 | ND B14.5a NADH dehydrogenase (ubiquinone) 1 alpha subcomplex, 7 |
| | | (14.5 kD, B14.5a) |
| 2906 | 18591813 | Unknown |
| 2907 | 18592023 | Unknown |
| 2908 | 18592069 | Unknown |
| 2909 | 18592852 | Unknown |
| 2910 | 18593545 | Unknown |
| 2911 | 18593908 | Unknown |
| 2912 | 18593939 | secretory protein 45 kDa, similar to |
| 2913 | 18594017 | Unknown |
| 2914 | 18594189 | Unknown |
| 2915 | 18594359 | Unknown |
| 2916 | 18594592 | Unknown |
| 2917 | 18594594 | Unknown |
| 2918 | 18594767 | Unknown |
| 2919 | 18594954 | Unknown |
| 2920 | 18594992 | Unknown |
| 2921 | 18595043 | Unknown |
| 2922 | 18595057 | Unknown |
| 2923 | 18595318 | Unknown |
| 2924 | 18595340 | Unknown |
| 2925 | 18595665 | Unknown |
| 2926 | 18596319 | glycerol kinase (H. sapiens), similar to |
| 2927 | 18596413 | Unknown |
| 2928 | 18596484 | Unknown |
| 2929 | 18596861 | RAS-RELATED PROTEIN RAB-15, similar to |
| 2930 | 18597225 | Unknown |
| 2931 | 18597549 | ZINC FINGER PROTEIN 268 (ZINC FINGER PROTEIN HZF3), similar to |
| 2932 | 18597551 | Unknown |
| 2933 | 18597742 | Unknown |
| 2934 | 18598132 | Unknown |
| 2935 | 18598291 | kinesin family member C3 |
| 2936 | 18598462 | Unknown |
| 2937 | 18598482 | Unknown |
| 2938 | 18598674 | Unknown |
| 2939 | 18598989 | Unknown |
| 2940 | 18599137 | zinc finger protein 2 (A1-5) |
| 2941 | 18599227 | Unknown |
| 2942 | 18599297 | EphB1 |
| 2943 | 18599533 | polyhomeotic 2 protein, similar to |
| 2944 | 18599587 | Unknown |
| 2945 | 18600174 | Unknown |
| 2946 | 18600186 | Unknown |
| 2947 | 18600274 | Unknown |
| 2948 | 18600320 | Unknown |
| 2949 | 18600459 | axonal transport of synaptic vesicles |
| 2950 | 18600477 | Unknown |
| 2951 | 18600510 | Unknown |
| 2952 | 18600673 | replication initiation region protein (60 kD) (H. sapiens), similar to |
| 2953 | 18600792 | Unknown |
| 2954 | 18600878 | Unknown |
| 2955 | 18600890 | Unknown |
| 2956 | 18601250 | Unknown |
| 2957 | 18601419 | Unknown |
| 2958 | 18601439 | Unknown |
| 2959 | 18601460 | Unknown |
| 2960 | 18601629 | huntingtin interacting protein-1-related (H. sapiens), similar to |
| 2961 | 18601927 | Unknown |
| 2962 | 18602066 | Unknown |
| 2963 | 18602347 | Unknown |
| 2964 | 18602382 | chromosome condensation-related SMC-associated protein 1 |
| 2965 | 18602858 | PUTATIVE NUCLEOSIDE DIPHOSPHATE KINASE (NDK) (NDP |
| | | KINASE), similar to |
| 2966 | 18602966 | Unknown |
| 2967 | 18603033 | Unknown |
| 2968 | 18603423 | Unknown |
| 2969 | 18603588 | solute carrier family 1 (glial high affinity glutamate transporter), member 2 |
| 2970 | 18603701 | Unknown |
| 2971 | 18603711 | Unknown |
| 2972 | 18603795 | Unknown |
| 2973 | 18603941 | PHOSPHATIDYLINOSITOL 3-KINASE REGULATORY SUBUNIT (IB PI3- |
| | | KINASE P101 SUBUNIT) (PTDINS-3-KINASE P101) (PI3K) (P101-PI3K), |
| | | similar to |
| 2974 | 18604379 | Unknown |
| 2975 | 18604520 | Unknown |
| 2976 | 18604537 | rab-related GTP-binding protein |
| 2977 | 18604876 | exostoses (multiple) 2 (H. sapiens), similar to |
| 2978 | 18605074 | Unknown |
| 2979 | 18605322 | Unknown |
| 2980 | 18605359 | Unknown |
| 2981 | 18606573 | Unknown |
| 2982 | 18645167 | annexin A2 |
| 2983 | 18676544 | Unknown |
| 2984 | 18676570 | Unknown |
| 2985 | 18676847 | Unknown |
| 2986 | 18860829 | optic atrophy 1, isoform 1 |
| 2987 | 18860843 | optic atrophy 1, isoform 7 |
| 2988 | 18916767 | Unknown |
| 2989 | 18916841 | Unknown |
| 2990 | 18959202 | leucine-rich PPR-motif containing; leucine-rich protein mRNA |
| 2991 | 19115954 | dynein, axonemal, heavy polypeptide 5 |
| 2992 | 19263915 | Unknown |
| 2993 | 19353103 | Unknown |
| 2994 | 19526647 | oxidored-nitro domain-containing protein |
| 2995 | 19584385 | Unknown |
| 2996 | 19684029 | Unknown |
| 2997 | 19743821 | integrin beta 1 isoform 1C-2 precursor; integrin VLA-4 beta subunit; |
| | | fibronectin receptor beta subunit |
| 2998 | 19850567 | breast carcinoma amplified sequence 3 |
| 2999 | 19923102 | holocarboxylase synthetase (biotin-[proprionyl-Coenzyme A-carboxylase |
| | | (ATP-hydrolysing)] ligase); Holocarbyoxylase synthetase; |
| | | holocarboxylase synthetase |
| 3000 | 19923233 | sterol carrier protein 2 |
| 3001 | 19923611 | Unknown |
| 3002 | 19923717 | rhysin 2 |
| 3003 | 19923721 | pre-T-cell receptor alpha precursor |
| 3004 | 19923757 | golgi autoantigen, golgin subfamily a, 2; golgin-95 |
| 3005 | 20070212 | voltage-dependent anion channel 3 |
| 3006 | 20070798 | androgen-regulated short-chain dehydrogenase/reductase 1 |
| 3007 | 20127408 | hydroxyacyl-Coenzyme A dehydrogenase/3-ketoacyl-Coenzyme A |
| | | thiolase/enoyl-Coenzyme A hydratase (trifunctional protein), alpha |
| | | subunit; Hydroxyacyl-Coenzyme A dehydrogenase/3-ketoacyl-Coenzyme |
| | | A thiolase/ |
| 3008 | 20127473 | glucose regulated protein, 58 kD |
| 3009 | 20127510 | peroxisomal long-chain acyl-coA thioesterase; peroxisomal long-chain |
| | | acyl-coA thioesterase; putative protein |
| 3010 | 20140018 | mitochondrial ribosomal protein S9, precursor (MRP-S9) |
| 3011 | 20140250 | Sideroflexin 1 |
| 3012 | 20141424 | Short chain 3-hydroxyacyl-CoA dehydrogenase, mitochondrial precursor |
| | | (HCDH) |
| 3013 | 20141538 | Homeobox protein Hox-C12 (Hox-3F) |
| 3014 | 20141568 | Isocitrate dehydrogenase [NADP], mitochondrial precursor |
| | | (Oxalosuccinate decarboxylase) (IDH) (NADP+-specific ICDH) (IDP) |
| | | (ICD-M) |
| 3015 | 20141580 | Mitochondrial 2-oxoglutarate/malate carrier protein (OGCP) |
| 3016 | 20141765 | Succinyl-CoA ligase [GDP-forming] alpha-chain, mitochondrial precursor |
| | | (Succinyl-CoA synthetase, alpha chain) (SCS-alpha) |
| 3017 | 20141946 | DNA topoisomerase II, beta isozyme |
| 3018 | 20147036 | transient receptor potential cation channel protein |
| 3019 | 20150348 | Deoxy Hbalphayq, A Mutant Of Hba |
| 3020 | 20151189 | Glutamate Dehydrogenase-Apo Form |
| 3021 | 20178093 | Suppressor of cytokine signaling 7 (SOCS-7) (Nck, Ash and |
| | | phospholipase C gamma-binding protein) (Nck-associated protein 4) |
| | | (NAP-4) |
| 3022 | 20268814 | CD36 antigen (collagen type I receptor, thrombospondin receptor) |
| 3023 | 20270305 | synaptotagmin-like 5 |
| 3024 | 20270399 | polycystic kidney and hepatic disease 1 |
| 3025 | 226207 | dihydrolipoamide S-acetyltransferase |

[0157] Table 2 presents a selected subset of the 3025 human heart mitochondrial proteins that are disclosed in Table 1 and in the Sequence Listing. The mitochondrial proteins of Table 2 are organized according to particular mitochondrial function classifications as indicated, based on analysis of amino acid sequences and GENBANK annotations; a number of the entries in Table 2 may use earlier GENBANK Accession numbers which differ from those shown in Table 1, but the sequences of such GENBANK Accession numbers can each be matched to a sequence in the Sequence Listing of the instant application using sequence database searching software tools as exemplified above and as known to the art (e.g., Basic Local Alignment Search Tool (“BLAST”), http://www.ncbi.nim.nih.gov/BLAST, Altschul, J. Mol. Biol. 219:555-565, 1991, Henikoff et al., Proc. Natl. Acad. Sci. USA 89:10915-10919, 1992; PSI-BLAST, ALIGN, MEGALIGN; WISETOOLS. CLUSTAL W, Thompson et al., 1994 Nucl. Ac. Res. 22:4673; CAP, www.no.embnet. org/clustalw.html; FASTA/FASTP, Pearson, 1990 Proc. Nat. Acad. Sci. USA 85:2444, available from D. Hudson, Univ. of Virginia, Charlottesville, Va.). As described above, each amino acid sequence provides a polypeptide structure from which a sample can be analyzed to determine, on the basis of structure, whether a modified polypeptide as provided herein may be present in the sample. As also described above, each functional classification refers to a defined biological activity measureable according to methods provided herein and known to the art, such that the invention contemplates determination in a sample of whether a polypeptide that exhibits altered biological activity is present.

TABLE 2
MITOCHONDRIAL FUNCTIONS OF SELECTED
COMPONENTS OF THE HUMAN HEART
MITOCHONDRIAL PROTEOME

| MITOCHONDRIAL FUNCTION | GENBANK | SEQ ID |
|---|---|---|
| CLASSIFICATION | ACC NO. | NO: |
| Amino acid metabolism | 118533 | 351 |
| | 2695812 | 563 |
| | 4504067 | 75 |
| | 4758714 | 527 |
| | 6624122 | 4 |
| | 11545863 | 520 |
| | 12653507 | 76 |
| | 13027640 | 491 |
| | 13518228 | 519 |
| | 14764412 | 240 |
| | 14775546 | 506 |
| | 16877964 | 453 |
| Amino acid metabolism Total | 12 | |
| Apoptosis | 2286145 | 159 |
| | 10437144 | 843 |
| | 10835173 | 637 |
| | 12382773 | 158 |
| | 14729475 | 101 |
| | 14761496 | 717 |
| | 16163817 | 100 |
| Apoptosis Total | 7 | |
| C-compound metabolism | 1354222 | 40 |
| | 4758498 | 405 |
| | 11275986 | 360 |
| | 11428230 | 37 |
| | 11436533 | 36 |
| | 12230075 | 359 |
| | 12652981 | 361 |
| | 13630862 | 39 |
| | 14043187 | 38 |
| | 14724751 | 695 |
| C-compound metabolism Total | 10 | |
| Carrier | 113463 | 153 |
| | 4505775 | 157 |
| | 4557403 | 155 |
| | 7657347 | 532 |
| | 11141885 | 851 |
| | 12232421 | 920 |
| | 12653827 | 531 |
| | 13632616 | 152 |
| | 13647558 | 151 |
| | 14747216 | 154 |
| | 14752024 | 850 |
| | 14774525 | 156 |
| Carrier Total | 12 | |
| Complex 1 | 13013 | 599 |
| | 1262579 | 583 |
| | 1262580 | 592 |
| | 4505355 | 620 |
| | 4505357 | 609 |
| | 4505359 | 613 |
| | 4505361 | 611 |
| | 4505365 | 617 |
| | 4505367 | 605 |
| | 4689104 | 610 |
| | 4758768 | 600 |
| | 4758772 | 621 |
| | 4758776 | 607 |
| | 4758784 | 614 |
| | 4758786 | 601 |
| | 4758790 | 588 |
| | 4758792 | 586 |
| | 4826848 | 612 |
| | 4826852 | 608 |
| | 4894370 | 619 |
| | 6041669 | 616 |
| | 7657369 | 591 |
| | 10092657 | 585 |
| | 10179599 | 622 |
| | 10764847 | 618 |
| | 10835025 | 596 |
| | 10835087 | 584 |
| | 12005918 | 369 |
| | 13097156 | 598 |
| | 13272567 | 602 |
| | 13272568 | 604 |
| | 13528960 | 590 |
| | 13637608 | 606 |
| | 14336775 | 623 |
| | 14769051 | 615 |
| | 14777313 | 587 |
| | 15307634 | 595 |
| Complex 1 Total | 37 | |
| Complex 2 | 4759080 | 865 |
| | 13639114 | 792 |
| | 14727486 | 867 |
| | 16157047 | 791 |
| Complex 2 Total | 4 | |
| Complex 3 | 117759 | 944 |
| | 117863 | 947 |
| | 190804 | 946 |
| | 1351360 | 934 |
| | 9297078 | 933 |
| | 11128019 | 233 |
| | 13631678 | 945 |
| | 13649658 | 948 |
| | 14736223 | 942 |
| | 14775827 | 943 |
| Complex 3 Total | 10 | |
| Complex 4 | 117103 | 211 |
| | 226209 | 221 |
| | 1262581 | 207 |
| | 4502985 | 213 |
| | 4502987 | 218 |
| | 4502989 | 217 |
| | 4502991 | 219 |
| | 4502993 | 220 |
| | 4758038 | 210 |
| | 4758040 | 215 |
| | 13629150 | 209 |
| | 13637833 | 216 |
| | 13648426 | 237 |
| | 16196598 | 212 |
| Complex 4 Total | 14 | |
| Complex 5 | 114549 | 84 |
| | 1262582 | 80 |
| | 4502297 | 87 |
| | 4502303 | 93 |
| | 5901896 | 89 |
| | 6005717 | 88 |
| | 11526149 | 85 |
| | 13272855 | 81 |
| | 13543618 | 83 |
| | 14774139 | 91 |
| Complex 5 Total | 10 | |
| DNA synthesis | 118749 | 497 |
| | 1709123 | 281 |
| | 4153874 | 840 |
| | 11225260 | 283 |
| DNA synthesis Total | 4 | |
| Glycolysis | 31645 | 355 |
| | 107554 | 752 |
| | 129070 | 750 |
| | 136066 | 921 |
| | 387011 | 751 |
| | 4557032 | 467 |
| | 11430299 | 401 |
| | 12653371 | 684 |
| | 13436413 | 350 |
| | 14043654 | 831 |
| | 14761208 | 356 |
| | 15553127 | 403 |
| | 15991827 | 402 |
| Glycolysis Total | 13 | |
| Guanine-related | 106185 | 372 |
| | 121009 | 379 |
| | 386745 | 380 |
| | 1335250 | 784 |
| | 4504049 | 378 |
| | 4506517 | 764 |
| | 6005772 | 747 |
| | 10047118 | 344 |
| | 10945428 | 516 |
| | 11055998 | 376 |
| | 14745808 | 377 |
| | 15779126 | 375 |
| | 16181084 | 343 |
| Guanine-related Total | 13 | |
| Inositol-related | 108480 | 688 |
| | 124505 | 433 |
| | 1399105 | 682 |
| | 4505801 | 686 |
| | 10835023 | 431 |
| | 11436778 | 435 |
| | 14724557 | 683 |
| | 14728229 | 687 |
| | 14760649 | 432 |
| | 14783738 | 434 |
| Inositol-related Total | 10 | |
| Kinase/phosphatase | 130749 | 45 |
| | 1103677 | 573 |
| | 1709242 | 650 |
| | 4503269 | 246 |
| | 4505153 | 510 |
| | 4506091 | 551 |
| | 4557769 | 522 |
| | 7439346 | 737 |
| | 10047120 | 437 |
| | 11526789 | 430 |
| | 12643716 | 738 |
| | 12654407 | 574 |
| | 12659007 | 733 |
| | 12830367 | 803 |
| | 13606056 | 280 |
| | 13631907 | 553 |
| | 13646385 | 222 |
| | 13648611 | 802 |
| | 13938619 | 224 |
| | 14194461 | 11 |
| | 14721507 | 801 |
| | 14733904 | 799 |
| | 14736227 | 774 |
| | 14740371 | 12 |
| | 14749765 | 10 |
| | 14782921 | 732 |
| | 14784064 | 552 |
| | 14785405 | 706 |
| | 15301488 | 418 |
| | 16033591 | 808 |
| Kinase/phosphatase Total | 30 | |
| Lipid metabolism | 1082723 | 722 |
| | 1169204 | 286 |
| | 1762533 | 148 |
| | 3273228 | 18 |
| | 4501869 | 22 |
| | 4502327 | 97 |
| | 4503607 | 295 |
| | 4503609 | 296 |
| | 4503651 | 322 |
| | 4504975 | 484 |
| | 4557817 | 869 |
| | 4557833 | 724 |
| | 4758312 | 297 |
| | 10835059 | 319 |
| | 11276083 | 323 |
| | 11433007 | 678 |
| | 11640566 | 421 |
| | 12669909 | 483 |
| | 12707570 | 304 |
| | 12805021 | 19 |
| | 13435350 | 327 |
| | 13639628 | 13 |
| | 13647276 | 465 |
| | 13653049 | 20 |
| | 14041699 | 310 |
| | 14043451 | 373 |
| | 14725848 | 21 |
| | 14729783 | 252 |
| | 14730775 | 420 |
| | 14746487 | 815 |
| | 14764159 | 14 |
| | 14764202 | 419 |
| | 14769776 | 674 |
| | 14781245 | 324 |
| Lipid metabolism Total | 34 | |
| Lipoprotein | 229479 | 480 |
| | 1082692 | 693 |
| | 4826914 | 691 |
| | 9438229 | 692 |
| | 13470094 | 70 |
| | 14721241 | 485 |
| Lipoprotein Total | 6 | |
| Nucleotide metabolism | 4502013 | 28 |
| | 4502457 | 78 |
| | 4503375 | 258 |
| | 8671846 | 204 |
| | 13654685 | 79 |
| | 14776778 | 77 |
| Nucleotide metabolism Total | 6 | |
| Protease | 4502201 | 30 |
| | 4502563 | 137 |
| | 7656959 | 139 |
| | 10047106 | 144 |
| | 12408656 | 136 |
| | 12643637 | 24 |
| | 12654627 | 517 |
| | 14772672 | 138 |
| | 14780055 | 727 |
| | 16741033 | 726 |
| Protease Total | 10 | |
| Protein targeting | 123571 | 385 |
| | 1091688 | 390 |
| | 1346317 | 387 |
| | 4008131 | 184 |
| | 5032181 | 915 |
| | 5802970 | 33 |
| | 6912714 | 916 |
| | 7657257 | 917 |
| | 7662673 | 918 |
| | 9910382 | 533 |
| | 12655195 | 391 |
| | 13645492 | 389 |
| | 14603309 | 386 |
| Protein targeting Total | 13 | |
| ras/GTPase | 1657266 | 789 |
| | 5803135 | 755 |
| | 11359874 | 371 |
| | 11436135 | 761 |
| | 12652715 | 648 |
| | 12751117 | 704 |
| | 13569962 | 845 |
| | 13651229 | 772 |
| | 13652324 | 760 |
| | 13786129 | 417 |
| | 13794267 | 757 |
| | 14211570 | 202 |
| | 14249144 | 754 |
| | 14740792 | 1390 |
| ras/GTPase Total | 14 | |
| Receptor | 184477 | 771 |
| | 1001941 | 257 |
| | 1168781 | 316 |
| | 4504733 | 436 |
| | 4877291 | 763 |
| | 11968152 | 852 |
| | 13632266 | 894 |
| | 13650874 | 748 |
| | 14732886 | 895 |
| | 14744234 | 646 |
| | 16161569 | 788 |
| Receptor Total | 11 | |
| Redox | 802150 | 662 |
| | 4502601 | 143 |
| | 4557845 | 775 |
| | 6912536 | 633 |
| | 11399466 | 239 |
| | 11416669 | 632 |
| | 12804319 | 142 |
| | 13112023 | 199 |
| | 13236495 | 753 |
| | 13529257 | 41 |
| | 13627233 | 42 |
| | 13994325 | 744 |
| | 14735899 | 235 |
| Redox Total | 13 | |
| Stress | 4503731 | 331 |
| | 4758192 | 800 |
| | 5453902 | 634 |
| | 7643782 | 383 |
| | 13631440 | 675 |
| | 14250063 | 676 |
| | 14755436 | 874 |
| Stress Total | 7 | |
| Structural | 13194197 | 459 |
| | 13643253 | 460 |
| | 14124976 | 461 |
| | 14730782 | 462 |
| | 15305472 | 924 |
| Structural Total | 5 | |
| TCA cycle | 417178 | 450 |
| | 1071834 | 256 |
| | 1170477 | 451 |
| | 1718502 | 16 |
| | 5031777 | 448 |
| | 5174539 | 500 |
| | 11321581 | 872 |
| | 11321583 | 868 |
| | 11374664 | 452 |
| | 12804901 | 449 |
| | 13627252 | 658 |
| | 13639817 | 505 |
| | 14740547 | 342 |
| | 14782063 | 501 |
| | 15318843 | 17 |
| | 16192638 | 446 |
| TCA cycle Total | 16 | |
| Transcription | 105294 | 48 |
| | 107912 | 905 |
| | 1033182 | 1400 |
| | 1582692 | 888 |
| | 2565032 | 904 |
| | 4506445 | 780 |
| | 4507389 | 301 |
| | 6678455 | 908 |
| | 6912440 | 287 |
| | 9884738 | 67 |
| | 11096171 | 783 |
| | 11761696 | 119 |
| | 11890755 | 782 |
| | 12653775 | 394 |
| | 12734816 | 741 |
| | 13242069 | 647 |
| | 13787197 | 242 |
| | 13938539 | 232 |
| | 14730158 | 889 |
| | 14742266 | 781 |
| | 14748858 | 910 |
| | 14766373 | 765 |
| | 14790190 | 847 |
| | 15296351 | 859 |
| | 15300149 | 558 |
| | 15451854 | 530 |
| | 16163124 | 926 |
| Transcription Total | 27 | |
| Translation | 1706611 | 300 |
| | 4503507 | 311 |
| | 4758118 | 243 |
| | 5032051 | 6 |
| | 7661872 | 474 |
| | 7705626 | 543 |
| | 7706349 | 546 |
| | 11177148 | 535 |
| | 11416393 | 538 |
| | 11424404 | 544 |
| | 11559927 | 542 |
| | 11596859 | 537 |
| | 13027604 | 547 |
| | 13123976 | 73 |
| | 13559404 | 534 |
| | 13631521 | 549 |
| | 13648964 | 35 |
| | 13899231 | 541 |
| | 14028389 | 539 |
| | 14028405 | 545 |
| | 14165270 | 536 |
| | 14285174 | 299 |
| | 15150811 | 548 |
| | 15295574 | 469 |
| | 15298022 | 540 |
| Translation Total | 25 | |
| Transport | 28714 | 52 |
| | 114374 | 579 |
| | 1172554 | 1394 |
| | 1359715 | 578 |
| | 1588292 | 130 |
| | 4503057 | 225 |
| | 5729937 | 518 |
| | 5730033 | 848 |
| | 7799988 | 470 |
| | 8923870 | 408 |
| | 10716563 | 135 |
| | 10835220 | 94 |
| | 11612670 | 690 |
| | 12803281 | 1395 |
| | 13376991 | 1396 |
| | 13540606 | 875 |
| | 13649217 | 1393 |
| | 14149607 | 186 |
| | 14739472 | 710 |
| | 14767738 | 134 |
| | 14778381 | 294 |
| | 16974753 | 849 |
| Transport Total | 22 | |
| Tumor-related | 120749 | 498 |
| | 132164 | 768 |
| | 1177438 | 123 |
| | 4507643 | 930 |
| | 10567164 | 348 |
| | 10835155 | 928 |
| | 10863907 | 397 |
| | 12246901 | 929 |
| | 12643796 | 770 |
| | 13529047 | 912 |
| | 13650639 | 515 |
| | 14725399 | 898 |
| | 14755336 | 931 |
| | 15076827 | 665 |
| | 15296762 | 1388 |
| | 16160929 | 769 |
| Tumor-related Total | 16 | |
| Zinc finger | 1177230 | 1401 |
| | 2117022 | 1402 |
| | 2317769 | 714 |
| | 3021386 | 1403 |
| | 4507979 | 1404 |
| | 4827065 | 1405 |
| | 5454180 | 1407 |
| | 7671629 | 464 |
| | 14211907 | 1410 |
| | 14286186 | 1406 |
| | 14670360 | 1409 |
| | 14755316 | 3025 |
| | 14755456 | 1408 |
| Zinc finger Total | 13 | |

### Example 4

### OXIDATIVE POST-TRANSLATIONAL MODIFICATION OF TRYPTOPHAN RESIDUES IN CARDIAC MITOCHONDRIAL PROTEINS

[0158] This example shows the distribution of N-formylkynurenine, a product of the dioxidation of tryptophan residues in proteins, throughout the human heart mitochondrial proteome. This oxidized amino acid was associated with a distinct subset of proteins, including an over-representation of complex I subunits as well as complex V subunits and enzymes involved in redox metabolism. No relationship was observed between the tryptophan modification and methionine oxidation, a known artifact of sample handling. As the mitochondria were isolated from normal human heart tissue and not subject to any artificially induced oxidative stress, the susceptible tryptophan residues in this group of proteins appeared, according to non-limiting theory, to be “hot spots” for oxidation in close proximity to a source of reactive oxygen species (ROS) in respiring mitochondria.

[0159] LC/MS/MS data generated from the human heart mitochondrial proteome project as described in the preceding Examples, as well as data for human and bovine proteins prepared by sucrose density gradient centrifugation as described above, or by immunoprecipitation using antibodies against complex V (ATP synthase) and/or complex I (NADH dehydrogenase) proteins (see, Table 2), were queried against the human or bovine subsets of GenBank using the Sonar MSMS searching algorithm (Genomic Solutions, Ann Arbor, Mich.) with oxidation of methionine (+16 u) and tryptophan (+32 u) specified as differential modifications. Corresponding MALDI spectra were manually inspected. FIG. 3 shows oxidation products of tryptophan from proteins, including N-formylkynurenine (Structure 2).

[0160] Modifications to complex I subunits in bovine heart mitochondria in response to the oxidative stress caused by peroxynitrite treatment were studied in vitro, and yielded evidence of oxidized tryptophan in several subunits, both by MALDI TOF and by LC/MS/MS. Surprisingly, the relative intensities of the peaks in the MALDI spectra corresponding to peptides containing N-formylkynurenine were also high in untreated mitochondria from some bovine and human heart preparations, although there was substantial variation. Prior to complex I isolation and electrophoresis, mitochondria were prepared identically from all hearts which were freshly collected, frozen and thawed immediately prior to analysis. FIG. 4 shows the MALDI spectra of peptides from the human complex I subunit, NDUFS4 (see Table 3), and its bovine homologue from five different preparations corresponding to seven different hearts (five human, including one pooled sample of mitochondria from three individual hearts, and two bovine hearts). The relative intensities of m/z 1329.6 and 1361.6 (corresponding to peptides without and with dioxidized tryptophan, FIG. 4A) and 1112.5 and 1128.5 (corresponding to peptides without and with oxidized methionine, FIG. 4B) were used as a rough measure of protein oxidation. No correlation was found between the extent of tryptophan oxidation and that of methionine oxidation, suggesting that they occurred via different mechanisms.

[0161] The dioxidation of tryptophan was clearly discernable in FIG. 4A (i) and (ii) in which complex I was purified by different methods, sucrose density gradient centrifugation or immunoprecipitation, respectively, but corresponded to mitochondria from the same human heart. This finding suggested that the method of preparation was not a factor in determining the extent of oxidation, but rather that such oxidation was a characteristic of the donor from which the sample was obtained (in this case, a 41-year-old male Caucasian who died of brain cancer). The other human donor, displaying far less extensive oxidation of tryptophan as seen in FIG. 4A (iii), was a 62-year-old female Caucasian who died of intracranial bleeding. In contrast, NDUFS4 from a pool of mitochondria from three human hearts displayed an extensively oxidized tryptophan-containing peptide FIG. 4A (iv). Again the degree of oxidation in the pooled sample was not commensurate with the degree of oxidation for the methionine-containing fragment FIG. 4B (iv).

[0162] Distribution of the oxidatively modified tryptophan in the MS/MS spectra dataset described in the preceding Examples was assessed by reanalyzing the data with N-formylkynurenine selected as a differential modification of tryptophan (+32) using the SonarMSMS algorithm according to the supplier's instructions (Genomic Solutions, Ann Arbor, Mich.). Table 3 lists N-formylkynurenine-containing peptides found with peptide expect scores (Epep) values ≦1×10⁻² (99% confidence); also listed in Table 3 are the identifiers for the mitochondrial polypeptide sequences from which these peptides derived. Of this list of 51 peptide sequences from 39 proteins, 9 subunits of complex I had N-formylkyenurine-containing tryptic peptides and included two newly discovered subunits (Table 1, NCBI/Genbank Acc. Nos. 13938442 and 17455445, now 21754001). This subset of proteins was used to compare tryptophan oxidation versus methionine oxidation as a function of the ability to observe a peptide in any given LC/MS/MS experiment. As shown in FIG. 5, the numbers of distinct peptides containing methionine (A) and tryptophan (B) were plotted for a given complex I subunit which had a Sonar MSMS Epep score of ≦1×10⁻², and on each plot FIG. 5 indicates whether the corresponding oxidized residue was observed. Methionine oxidation appeared to be directly related to the number of observable peptides that would be expected if oxidation were a random sample-handling artifact. In contrast, tryptophan oxidation appeared to be much more specific to selected subunits, with the greatest modification being noted for NDUFV1 (51 kDa flavoprotein 1) and NDUFA9 (a 39 kDa reductase/isomerase subunit). In addition, five subunits of the iron-protein component were oxidized.

TABLE 3
PEPTIDES CONTAINING DOUBLY OXIDIZED
TRYPTOPHAN FROM THE CARDIAC
MITOCHONDRIAL PROTEOME.

| | | Peptide | |
|---|---|---|---|
| | | Derived | |
| | | from | |
| | | NCBI/ | |
| | | Genbank | PROTEIN |
| PEPTIDE | Epep | Acc. No. | DESCRIPTION |
| VFEISPFEPwITR | 1.40E−05 | 6681764 | NDUFA9 |
| FGPIPLGSLGwK | 2.30E−04 | 6681764 | NDUFA9 |
| wLSAEIEDVKPAK | 1.80E−03 | 6681764 | NDUFA9 |
| HAGGVTGGwDNLLAVIPGGS | 2.10E−04 | 20149568 | NDUFV1 |
| STPLIPK | | | |
| GDARPAEIDSLwEISK | 9.40E−04 | 20149568 | NDUFV1 |
| GPDwILGEIK | 2.40E−03 | 20149568 | NDUFV1 |
| LAALPENPPAIDwAYYK | 3.20E−05 | 5453559 | ATPase d F0 |
| TIDwVAFAEIIPQNQK | 2.10E−03 | 5453559 | ATPase d F0 |
| YPYwPHQPIENL | 7.20E−03 | 5453559 | ATPase d F0 |
| wVVIGDENYGEGSSR | 8.40E−08 | 3600098 | aconitase precursor |
| VAEKEGwPLDIR | 4.00E−04 | 3600098 | aconitase precursor |
| LwISNGGLADIFTVFAK | 2.90E−06 | 18044943 | acyl-Coenzyme A |
| | | | dehydrogenase, very long chain |
| IFGSEAAwK | 3.90E−03 | 18044943 | acyl-Coenzyme A |
| | | | dehydrogenase, very |
| | | | long chain |
| ALGVLAQLIwSR | 1.10E−05 | 4758076 | citrate synthase precursor |
| DYIwNTLNSGR | 7.10E−04 | 4758076 | citrate synthase |
| | | | precursor |
| KLETAVNLAwTAGNSNTR | 1.60E−05 | 4507879 | VDAC-1 |
| wNTDNTLGTEITVEDQLAR | 5.30E−03 | 4507879 | VDAC-1 |
| VVDGAVGAQwLAEFR | 4.70E−05 | 17458911 | dihydrolipoamide |
| | | | S-acetyltransferase |
| VPEANSSwMDTVIR | 6.60E−04 | 17458911 | dihydrolipoamide |
| | | | S-acetyltransferase |
| SAVTALwGK | 3.70E−03 | 4504349 | beta globin |
| LLVVYPwTQR | 4.30E−03 | 4504349 | beta-globin |
| RPPEPTTPwQEDPEPEDENL | 6.80E−08 | 13938442 | neuronal protein |
| YEK | | | (ND17.3) |
| NLTQYSwLLDGFPR | 1.00E−06 | 19923437 | adenylate kinase 3 |
| | | | alpha like |
| FDLNSPwEAFPVYR | 2.10E−05 | 11360206 | NDUFS3 |
| IASGLGLAwIVGR | 2.60E−05 | 4758714 | microsomal glutathione |
| | | | S-transferase 3 |
| GYIVIEDLwK | 2.90E−05 | 12001992 | brain my025 |
| ASSTSPVEISEwLDQK | 4.00E−05 | 4503607 | electron transfer |
| | | | flavoprotein alpha |
| | | | polypeptide |
| GRPTSTNPIASIFAwTR | 6.40E−05 | 4504575 | isocitrate |
| | | | dehydrogenase 2 |
| | | | (NADP+), |
| | | | mitochondrial |
| GLLTYTSwEDALSR | 1.40E−04 | 21411235 | NDUFS1 |
| IPwFQYPIIYDIR | 1.90E−04 | 6005854 | D-prohibitin |
| GLSDGEwQLVLNVwGK | 2.50E−04 | 229361 | Myoglobin |
| ASwSSLSMDEK | 3.00E−04 | 5921895 | Cytochrome c oxidase |
| | | | subunit IV isoform 1 |
| LDDLVNwAR | 5.30E−04 | 21750696 | NDUFS7 |
| TLLwTELFR | 7.80E−04 | 4505371 | NDUFS8 |
| SYGANFSwNK | 8.70E−04 | 13528960 | NDUFS4 |
| ASLHALVGSPIIwGGEPR | 9.90E−04 | 13676336 | long-chain acyl-coA |
| | | | thioesterase |
| | | | peroxisomal |
| wEVADLQPQLK | 1.20E−03 | 21903482 | Ubiquinol-cytochrome |
| | | | C reductase complex |
| | | | core protein 2 |
| YEGFFSLwK | 1.30E−03 | 21361114 | mitochondrial carrier; |
| | | | oxoglutarate carrier |
| LITTQQwLIK | 1.40E−03 | 13272660 | ATP synthase 6 |
| LWEPLVEEPPADQwK | 1.50E−03 | 4826848 | NDUFA5 |
| IDEAILITwTK | 2.00E−03 | 15991833 | hexokinase 1 |
| wDGQETTLVR | 3.30E−03 | 458862 | fatty acid binding |
| | | | protein, heart; hFABP |
| HwLDSPwPGFFTLDGQPR | 3.40E−03 | 20541592 | 2-oxoglutarate |
| | | | dehydroqenase E1 |
| | | | component, |
| | | | mitochondrial |
| | | | precursor |
| AwNGSAEGPGKVER | 4.30E−03 | 21754001 | Unnamed protein |
| | | | product (NDUFB11) |
| ELwFSDDPNVTK | 4.70E−03 | 4757732 | programmed cell death |
| | | | 8 (apoptosis-inducing |
| | | | factor AIF) |
| EQwDTIEELIR | 5.30E−03 | 4503301 | 2,4-dienoyl CoA |
| | | | reductase 1 precursor |
| GAwSNVLR | 5.30E−03 | 86754 | carrier ANT |
| wYYNAAGFNK | 5.30E−03 | 5454152 | UCR ubiquinone- |
| | | | binding protein (VI) |
| ELDSITPEVLPGwK | 5.50E−03 | 8131894 | Mitofilin |
| APLAEEwDNMTMK | 8.10E−03 | 4505093 | monoamine oxidase B |
| LATFwYYAK | 9.10E−03 | 22096328 | ATP synthase G chain, |
| | | | mitochondrial |

[0163] From the foregoing it will be appreciated that, although specific embodiments of the invention have been described herein for purposes of illustration, various modifications may be made without deviating from the spirit and scope of the invention. Accordingly, the invention is not limited except as by the appended claims.

The application's sequence listing, which the Patent Office published only in electronic form, follows.

SEQUENCE LISTING (3077 sequences)

SEQ ID NO: 1 - protein, 459 aa, Homo sapiens
MLKLIVPTIMLLPLTWLSKKHMIWINTTTHSLIISIIPLLFFNQINNNLFSCSPTFSSDPLTTPLLMLTTWLLPLTIMASQRHLSSEPLSRKKLYLSMLISLQISLIMTFTATELIMFYIFFETTLIPTLAIITRWGNQPERLNAGTYFLFYTLVGSLPLLIALIYTHNTLGSLNILLLTLTAQELSNSWANNLMWLAYTMAFMVKMPLYGLHLWLPKAHVEAPIAGSMLLAAVLLKLGGYGMMRLTLILNPLTKHMAYPFLVLSLWGMIMTSSICLRQTDLKSLIAYSSISHMALVVTAILIQTPWSFTGAVILMIAHGLTSSLLFCLANSNYERTHSRIMILSQGLQTLLPLMAFWWLLASLANLALPPTINLLGELSVLVTTFSWSNITLLLTGLNMLVTALYSLYMFTTTQWGSLTHHINNMKPSFTRENTLMFMHLSPILLLSLNPDIITGFSS

SEQ ID NO: 2 - protein, 609 aa, Homo sapiens [sequence omitted]

SEQ ID NO: 3 - protein, 911 aa, Homo sapiens [sequence omitted]

SEQ ID NO: 4 - protein, 397 aa, Homo sapiens
AGAPGPHGPVGPAGKHGNRGETGPSGPVGPAGAVGPRGPSGPQGIRGDKGEPGEKGPRGLPGLKGHNGLQGLPGIAGHHGDQGAPGSVGPAGPRGPAGPSGPAGKDGRTGHPGTVGPAGIRGPQGHQGPAGPPGPPGPPGPPGVSGGGYDFGYDGDFYRADQPRSAPSLRPKDYEVDATLKSLNNQIETLLTPEGSRKNPARTCRDLRLSHPEWSSGYYWIDPNQGCTMDAIKVYCDFSTGETCIRAQPENIPAKNWYRSSKDKKHVWLGETINAGSQFEYNVEGVTSKEMATQLAFMRLLANYASQNITYHCKNSIAYMDEETGNLKKAVILQGSNDVELVAEGNSRFTYTVLVDGCSKKTNEWGKTIIEYKTNKPSRLPFLDIAPLDIGGADHEF

SEQ ID NO: 5 - protein, 280 aa, Homo sapiens
MALLLVSLLAFLRLGSGCHHRICHCSNRVFLCQESKVTEIPSDLPRNAIELRFVLTKLRVIQKGAFSGFGDLEKIEISQNDVLEVIEADVFSNLPKLHEIRIEKANNLLYINPEAFQNLPNLQYLLISNTGIKHLPDVHKIHSLQKVLLDIQDNINIHTIERNSFVGLSFESVILWLNKNGIQEIHNCAFNGTQLDELNLSDNNNLEELPNDVFHGASGPVILSELHPICNKPILRQEVDYMTQTRGQRSSLAEDNESSYSRGFDMTYTEFDYDLCNEVV

SEQ ID NO: 6 - protein, 335 aa, Homo sapiens [sequence omitted]

SEQ ID NO: 7 - protein, 216 aa, Homo sapiens
SDHTDNQRILEFFGLKKEECPAVRLITLEEEMTKYKPESEELTAERITEFCHRFLEGKIKPHLMSQELPEDWDKQPVKVLVGKNFEDVAFDEKKNVFVEFYAPWCGHCKQLAPIWDKLGETYKDHENIVIAKMDSTANEVEAVKVHSFPTLKFFPASADRTVIDYNGQRTLDGFKKFLESGGQDGAGDDDDLEDLEEAEEPDMEEDDDQKAVKDEL

SEQ ID NO: 8 - protein, 631 aa, Homo sapiens
NPGKQLFEKMVSGMYLGELVRLILVKMAKEGLLFEGRITPELLTRGKFNTSDVSAIEKNKEGLHNAKEILTRLGVEPSDDDCVSVQHVCTIVSFRSANLVAATLGAILNRLRDNKGTPRLRTTVGVDGSLYKTHPQYSRRFHKTLRRLVPDSDVRFLLSESGSGKGAAMVTAVAYRLAEQHRQIEETLAHFHLTKDMLLEVKKRMRAEMELGLRKQTHNNAVVKMLPSFVRRTPDGTENGDFLALDLGGTNFRVLLVKIRSGKKRTVEMHNKIYAIPIEIMQGTGEELFDHIVSCISDFLDYMGIKGPRMPLGFTFSFPCQQTSLDAGILITWTKGFKATDCVGHDVVTLLRDAIKRREEFDLDVVAVVNDTVGTMMTCAYEEPTCEVGLIVGTGSNACYMEEMKNVEMVEGDQGQMCINMEWGAFGDNGCLDDIRTHYDRLVNEYSLNAGKQRYEKMISGMYLGEIVRNILIDFTKKGFLFRGQISETMKTRGIFETKFLSQIESDRLALLQVRAILQQLGLNSTCDDSILVKTVCGVVSRRAAQLCGAGMAAVVDKIRENRGLDRLNVTVGVDGTLYKLHPHFSRIMHQTVKELSPKCNVSFLLSEDGSGKGAALITAVGVRLRTEASS

SEQ ID NO: 9 - protein, 745 aa, Homo sapiens
MGVPFFSSLRCMVDLGPCWAGGLTAEMKLLLALAGVLAILATPQPSEGAAPAVLGEVDTSLVLSSMEEAKQLVDKAYKERRESIKQRLRSGSASPMELLSYFKQPVAATRTAVRAADYLHVALDLLERKLRSLWRRPFNVTDVLTPAQLNVLSKSSGCAYQDVGVTCPEQDKYRTITGMCNNRRSPTLGASNRAFVRWLPAEYEDGFSLPYGWTPGVKRNGFPVALARAVSNEIVRFPTDQLTPDQERSLMFMQWGQLLDHDLDFTPEPAARASFVTGVNCETSCVQQPPCFPLKIPPNDPRIKNQADCIPFFRSCPACPGSNITIRNQINALTSFVDASMVYGSEEPLARNLRNMSNQLGLLAVNQRFQDNGRALLPFDNLHDDPCLLTNRSARIPCFLAGDTRSSEMPELTSMHTLLLREHNRLATELKSLNPRWDGERLYQEARKIVGAMVQIITYRDYLPLVLGPTAMRKYLPTYRSYNDSVDPRIANVFTNAFRYGHTLIQPFMFRLDNRYQPMEPNPRVPLSRVFFASWRVVLEGGIDPILRGLMATPAKLNRQNQIAVDEIRERLFEQVMRIGLDLPALNMQRSRDHGLPGYNAWRRFCGLPQPETVGQLGTVLRNLKLARKLMEQYGTPNNIDIWMGGVSEPLKRKGRVGPLLACIIGTQFRKLRDGDRFWWENEGVFSMQQRQALAQISLPRIICDNTGITTVSKNNIFMSNSYPRDFVNCSTLPALNLASWREAS

SEQ ID NO: 10 - protein, 478 aa, Homo sapiens
MAPLRPLLILALLAWVALADQESCKGRCTEGFNVDKKCQCDELCSYYQSCCTDYTAECKPQVTRGDVFTMPEDEYTVYDDGEEKNNATVHEQVGGPSLTSDLQAQSKGNPEQTPVLKPEEEAPAPEVGASKPEGIDSRPETLHPGRPQPPAEEELCSGKPFDAFTDLKNGSLFAFRGQYCYELDEKAVRPGYPKLIRDVWGIEGPIDAAFTRINCQGKTYLFKGNQYWRFEDGVLDPDYPRNISDGFDGIPDNVDAALALPAHSYSGRERVYFFKGKQYWEYQFQHQPSQEECEGSSLSAVFEHFAMMQRDSWEDIFELLFWGRTSAGTRQPQFISRDWHGVPGQVDAAMAGRIYISGMAPRPSLAKKQRFRHRNRKGYRSQRGHSRGRNQNSRRPSRAMWLSLFSSEESNLGANNYDDYRMDWLVPATCEPIQSVFFFSGDKYYRVNLRTRRVDTVDPPYPRSIAQYWLGCPAPGHL

SEQ ID NO: 11 - protein, 724 aa, Homo sapiens
MPEEVHHGEEEVETFAFQAEIAQLMSLIINTFYSNKEIFLRELISNASDALDKIRYESLTDPSKLDSGKELKIDIIPNPQERTLTLVDTGIGMTKADLINNLGTIAKSGTKAFMEALQAGADISMIGQFGVGFYSAYLVAEKVVVIRKHNDDEQYAWESSAGGSFTVRADHGEPIGMGTKVILHLKEDQTEYLEERRVKEVVKKHSQFIGYPITLYLEKEREKEISDDEAEEEKGEKEEEDKDDEEKPKIEDVGSDEEDDSGKDKKKKTKKIKEKYIDQEELNKTKPIWTRNPDDITQEEYGEFYKSLTNDWEDHLAVKHFSVEGQLEFRALLFIPRRAPFDLFENKKKKNNIKLYVRRVFIMDSCDELIPEYLNFIRGVVDSEDLPLNISREMLQQSKILKVIRKNIVKKCLELFSELAEDKENYKKFYEAFSKNLKLGIHEDSTNRRRLSELLRYHTSQSGDEMTSLSEYVSRMKETQKSIYYITGESKEQVANSAFVERVRKRGFEVVYMTEPIDEYCVQQLKEFDGKSLVSVTKEGLELPEDEEEKKKMEESKAKFENLCKLMKEILDKKVEKVTISNRLVSSPCCIVTSTYGWTANMERIMKAQALRDNSTMGYMMAKKHLEINPDHPIVETLRQKAEADKNDKAVKDLVVLLFETALLSSGFSLEDPQTHSNRIYRMIKLGLGIDEDEVAAEEPNAAVPDEIPPLEGDEDASRMEEVD

SEQ ID NO: 12 - protein, 262 aa, Homo sapiens
LQVQHASKQIAADKQYKGIVDCIVRIPKEQGVLSFWRGNLANVIRYFPTQALNFAFKDKYKQIFLGGVDRHAFWRYFAGNLASGGAAGATSLCFVYPLDFARTRLAADVGKSGTEREFRGLGDCLVKITKSDGIRGLYQGFSVSVQGIIIYRAAYFGVYDTAKGMLPDPKNTHIVVSWMIAQTVTAVAGVVSYPFDTVRRRMMMQSGRKGADIMYTGTVDCWRKIFRDEGGKAFFKGAWSNVLRGMGGAFVLVLYDELKKVI

SEQ ID NO: 13 - protein, 653 aa, Homo sapiens
MKLSLVAAMLLLLSAARAEEEDKKEDVGTVVGIDLGTTYSCVGVFKNGRVEIIANDQGNRITPSYVAFTPEGERLIGDAAKNQLTSNPENTVFDAKRLIGRTWNDPSVQQDIKFLPFKVVEKKTKPYIQVDIGGGQTKTFAPEEISAMVLTKMKETAEAYLGKKVTHAVVTVPAYFNDAQRQATKDAGTIAGLNVMRIINEPTAAAIAYGLDKREGEKNILVFDLGGGTFDVSLLTIDNGVFEVVATNGDTHLGGEDFDQRVMEHFIKLYKKKTGKDVRKDNRAVQKLRREVEKAKALSSQHQARIEIESFYEGEDFSETLTRAKFEELNMDLFRSTMKPVQKVLEDSDLKKSDIDEIVLVGGSTRIPKIQQLVKEFFNGKEPSRGINPDEAVAYGAAVQAGVLSGDQDTGDLVLLHVCPLTLGIETVGGVMTKLIPSNTVVPTKNSQIFSTASDNQPTVTIKVYEGERPLTKDNHLLGTFDLTGIPPAPRGVPQIEVTFEIDVNGILRVTAEDKGTGNKNKITITNDQNRLTPEEIERMVNDAEKFAEEDKKLKERIDTRNELESYAYSLKNQIGDKEKLGGKLSSEDKETMEKAVEEKIEWLESHQDADIEDFKAKKKELEEIVQPIISKLYGSAGPPPTGEEDTAEKDEL

SEQ ID NO: 14 - protein, 228 aa, Homo sapiens
MAWKSGGASHSELIHNLRKNGIIKTDKVFEVMLATDRSHYAKCNPYMDSPQSIGFQATISAPHMHAYALELLFDQLHEGAKALDVGSGSGILTACFARMVGCTGKVIGIDHIKELVDDSVNNVRKDDPTLLSSGRVQLVVGDGRMGYAEEAPYDAIHVGAAAPVVPQALIDQLKPGGRLILPVGPAGGNQMLEQYDKLQDGSIKMKPLMGVIYVPLTDKEKQWSRDEL

SEQ ID NO: 15 - protein, 262 aa, Homo sapiens
WRTCLQASRGAQTAAATAPRIKKFAIYRWDPDKAGDKPHMQTYKVDLNKCGPMVLDALIKIKNEVDSTLTFRRSCREGICGSCAMNINGGNTLACTRRIDTNLNKVSKIYPLPHMYVIKDLVPDLSNFYAQYKSIEPYLKKKDESQEGKQQYLQSIEEREKLDGLYECILCACCSTSCPSYWWNGDKYLGPAVLMQAYRWMIDSRDDFTEERLAKLQDPFSLYRCHTIMNCTRTCPKGLNPGKAIAEIKKMMATYKEKKASV

SEQ ID NO: 16 - protein, 34 aa, Homo sapiens
ADNNFTQETAMTMITISAQKNPTVFYLCASSRDI

SEQ ID NO: 17 - protein, 843 aa, Homo sapiens
FDVGSEKTRIGLAQYSGDPRIEWHLNAFSTKDEVIEAVRNLPYKGGNTLTGLALNYIFENSFKPEAGSRTGVSKIGILITDGKSQDDIIPPSRNLRESGVELFAIGVKNADVNELQEIASEPDSTHVYNVAEFDLMHTVVESLTRTLCSRVEEQDREIKASAHAITGPPTELITSEVTARSFMVNWTHAPGNVEKYRVVYYPTRGGKPDEVVVDGTVSSTVLKNLMSLTEYQIAVFAIYAHTASEGLRGTETTLALPMASDLLLYDVTENSMRVKWDAVPGASGYLILYAPLTEGLAGDEKEMKIGETHTDIELSGLLPNTEYTVTVYAMFGEEASDPVTGQETTLALSPPRNLRISNVGSNSARLTWDPTSRQINGYRIVYNNADGTEINEVEVDPITTFPLKGLTPLTEYTIAIFSIYDEGQSEPLIGVFTTEEVPAQQYLEIDEVTTDSFRVTWHPLSADEGLHKLMWIPVYGGKTEEVVLKEEQDSHVIEGLEPGTEYEVSLLAVLDDGSESEVVTAVGTTLDSFWTEPATTIVPTTSVTSVFQTGIRNLVVGDETTSSLRVKWDISDSDVQQFRVTYMTAQGDPEEEVIGTVMVPGSQNNLLLKPLLPDTEYKVTVTPIYTDGEGVSVSAPGKTLPSSGPQNLRVSEEWYNRLRITWDPPSSPVKGYRIVYKPVSVPGPTLETFVGADINTILITNLLSGMDYNVKIFASQASGFSDALTGMVKTLFLGVTNLQAKHVEMTSLCAHWQVHRHATAYRVVIESLQDRQKQESTVGGGTTRHCFYGLQPDSEYKISVYTKLQEIEGPSVSIMEKTQSLPTRPPTFPPTIPPAKEGKRIIE

SEQ ID NO: 18 - protein, 292 aa, Homo sapiens
MSGGGVIRGPAGNNDCRIYVGNLPPDIRTKDIEDVFYKYGAIRDIDLKNRRGGPPFAFVEFEDPRDAEDAVYGRDGYDYDGYRLRVEFPRSGRGTGRGGGGGGGGGAPRGRYGPPSRRSENRVVVSGLPPSGSWQDLKDHMREAGDVCYADVYRDGTGVVEFVRKEDMTYAVRKLDNTKFRSHEFCLSNREKLPTSGLKLMGPEVQVMEDLDLEAVVVAEAVAEATAGVAVTPQGEAEDHHAILPVIADLALVHKMIGDTFCRTHVVYSFPLFSTIFSFFNSNCFVQNGLKC

SEQ ID NO: 19 - protein, 1138 aa, Homo sapiens [sequence omitted]

SEQ ID NO: 20 - protein, 135 aa, Homo sapiens [sequence omitted]

SEQ ID NO: 21 - protein, 137 aa, Homo sapiens
MYGKIIFVLLLSAIVSISASSTTGVAMHTSTSSSVTKSYISSQTNDTHKRDTYAATPRAHEVSEISVRTVYPPEEETEITLIIFGVMAGVIGTILLISYGIRRLIKKSPSDVKPLPSPDTDVPLSSVEIENPETSDQ

SEQ ID NO: 22 - protein, 212 aa, Homo sapiens [sequence omitted]

SEQ ID NO: 23 - protein, 477 aa, Homo sapiens
MGALARALPSILLALLLTSTPEALGANPGLVARITDKGLQYAAQEGLLALQSELLRITLPDFTGDLRIPHVGRGRYEFHSLNIHSCELLHSALRPVPGQGLSLSISDSSIRVQGRWKVRKSFFKLQGSFDVSVKGISISVNLLLGSESSGRPTGYCLSCSSDIADVEVDMSGDSGWLLNLFHNQIESKFQKVLESRICEMIQKSVSSDLQPYLQTLPVTTEIDSFADIDYSLVEAPRATAQMLEVMFKGEIFHRNHRSPVTLLAAAEEHNKMVYFAISDYVFNTASLVYHEEGYLNFSITDDMIPPDSNIRLTTKSFRPFVPRLARLYPNMNLELQGSVPSAPLLNFSPGNLSVDPYMEIDAFVLLPSSSKEPVFRLSVATNVSATLTFNTSKITGFLKPGKVKVELKESKVGLFNAELLEALLNYYILNTLYPKFNDKLAEGFPLPLLKRVQLYDLGLQIHKDFLFLGANVQYMRV

SEQ ID NO: 24 - protein, 567 aa, Homo sapiens
LFGRPTRADRRVLGTEPRLAAGSFRGSVKRSAAPAGASQVQMKTIQLKLENIRSIFENQQAGFRNLADKHVRPIQFVVPTPENLVTSGTPFFSSKQGKKTWRQNQSNLKIEVVPDCQEKRSSGPSSSLDNGNSLDVLKNHVLNELIQTERVYVRELYTVLLGYRAEMDNPEMFDLMPPLLRNKKDILFGNMAEIYEFHNDIFLSSLENCAHAPERVGPCFLERKDDFQMYAKYCQNKPRSETIWRKYSECAFFQECQRKLKHRLRLDSYLLKPVQQITKYQLLLKELLKYSKDCEGSALLKKALDAMLDLLKSVNDSMHQIAINGYIGNLNELGKMIMQGGFSVWIGHKKGATKMKDLARFKPMQRHLFLYEKAIVFCKRRVESGEGSDRYPSYSFKHCWKMDEVGITEYVKGDNRKFEIWYGEKEEVYIVQASNVDVKMTWLKEIRNILLKQQELLTVKKRKQQDQLTERDKFQISLQQNDEKQQGAFISTEETELEHTSTVVEVCEAIASVQAEANTVWTEASQSAEISEEPAEWSSNYFYPTYDENEEENRPLMRPVSEMALLY

SEQ ID NO: 25 - protein, 531 aa, Homo sapiens [sequence omitted]

SEQ ID NO: 26 - protein, 5032 aa, Homo sapiens [sequence omitted]

SEQ ID NO: 27 - protein, 536 aa, Homo sapiens
EFGRASQALTPPPGKASAQPLPAPEAAHTTGPTGSAPNSPMALLTIGSSSEKEIDDVIDEIISLESSYNDEMLSYLPGGTTGLQLPSTLPVSGNLLDVYSSQGVATPAITVSNSCPAELPNIKREISETEAKALLKERQKKDNHNLIERRRRFNINDRIKELGTLIPKSSDPEMRWNKGTILKASVDYIRKLQKEQQRSKDLESRQRSLEQANRSLQLRIQELELQAQIHGLPVPGTPGLLSLATTSTSDSLKPEQLDIEEEGRPGARTFHVGGGPAQNAPHQQPPAPPSDALLDLHFPSDHLGDLGDPFHLGLEDILMEEEEGVVGGLSGGALSPLRAASDPLLSSVSLLSPRPAAAAAASAWKRSPDQASPLPWTFPPRKGGPCRMRPRLFPHPPMRLPRYLGRGDVIRPHPCNQARRRSQMRPCTFPKGTAQCRYFRRRRLEKDMRSGPAPWGSQPHPCPCGTHPCPGEGRRQDEVSTLSPRDCPSQVSWEREMSGCCSILCLGTTSLVRPGTEEESSNGGPSPGGLSSAPSP

SEQ ID NO: 28 - protein, 673 aa, Homo sapiens
MAKPAQGAKYRGSIHDFPGFDPNQDAEALYTAMKGFGSDKEAILDIITSRSNRQRQEVCQSYKSLYGKDLIADLKYELTGKFERLIVGLMRPPAYCDAKEIKDAISGIGTDEKCLIEILASRTNEQMHQLVAAYKDAYERDLEADIIGDTSGHFQKMLVVLLQGTREEDDVVSEDLVQQDVQDLYEAGELKWGTDEAQFIYILGNRSKQHLRLVFDEYLKTTGKPIEASIRGELSGDFEKLMLAVVKCIRSTPEYFAERLFKAMKGLGTRDNTLIRIMVSRSELDMLDIREIFRTKYEKSLYSMIKNDTSGEYKKTLLKLSGGDDDAAGQFFPEAAQVAYQMWELSAVARVELKGTVRPANDFNPDADAKALRKAMKGLGTDEDTIIDIITHRSNVQRQQIRQTFKSHFGRDLMTDLKSEISGDLARLILGLMMPPAHYDAKQLKKAMEGAGTDEKALIEILATRTNAEIRAINEAYKEDYHKSLEDALSSDTSGHFRRILISLATGHREEGGENLDQAREDAQVAAEILEIADTPSGDKTSLETRFMTILCTRSYPHLRRVFQEFIKMTNYDVEHTIKKEMSGDVRDAFVAIVQSVKNKPLFFADKLYKSMKGAGTDEKTLTRIMVSRSEIDLLNIRREFIEKYDKSLHQAIEGDTSGDFLKALLALCGGED

SEQ ID NO: 29 - protein, 1042 aa, Homo sapiens
MENAHTKTVEEVLGHFGVNESTGLSLEQVKKLKERWGSNELPAEEGKTLLELVIEQFEDLLVRILLLAACISFVLAWFEEGEETITAFVEPFVILLILVANAIVGVWQERNAENAIEALKEYEPEMGKVYRQDRKSVQRIKAKDIVPGDIVEIAVGDKVPADIRLTSIKSTTLRVDQSILTGESVSVIKHTDPVPDPRAVNQDKKNMLFSGTNIAAGKAMGVVVATGVNTEIGKIRDEMVATEQERTPLQQKLDEFGEQLSKVISLICIAVWIINIGHFNDPVHGGSWIRGAIYYFKIAVALAVAAIPEGLPAVITTCLALGTRRMAKKNAIVRSLPSVETLGCTSVICSDKTGTLTTNQMSVCRMFILDRVEGDTCSLNEFTITGSTYAPIGEVHKDDKPVNCHQYDGLVELATICALCNDSALDYNEAKGVYEKVGEATETALTCLVEKMNVFDTELKGLSKIERANACNSVIKQLMKKEFTLEFSRDRKSMSVYCTPNKPSRTSMSKMFVKGAPEGVIDRCTHIRVGSTKVPMTSGVKQKIMSVIREWGSGSDTLRCLALATHDNPLRREEMHLEDSANFIKYETNLTFVGCVGMLDPPRIEVASSVKLCRQAGIRVIMITGDNKGTAVAICRRIGIFGQDEDVTSKAFTGREFDELNPSAQRDACLNARCFARVEPSHKSKIVEFLQSFDEITAMTGDGVNDAPALKKAEIGIAMGSGTAVAKTASEMVLADDNFSTIVAAVEEGRAIYNNMKQFIRYLISSNVGEVVCIFLTAALGFPEALIPVQLLWVNLVTDGLPATALGFNPPDLDIMNKPPRNPKEPLISGWLFFRYLAIGCYVGAATVGAAAWWFIAADGGPRVSFYQLSHFLQCKEDNPDFEGVDCAIFESPYPMTMALSVLVTIEMCNALNSLSENQSLLRMPPWENIWLVGSICLSMSLHFLILYVEPLPLIFQITPLNVTQWLMVLKISLPVILMDETLKFVARNYLEPGKECVQPATKSCSFSACTDGISWPFVLLIMPLVIWVYSTDTNFSDMFWS

SEQ ID NO: 30 - protein, 1023 aa, Homo sapiens
MGKGVGRDKYEPAAVSEQGDKKGKKGKKDRDMDELKKEVSMDDHKLSLDELHRKYGTDLSRGLTSARAAEILARDGPNALTPPPTTPEWIKFCRQLFGGFSMLLWIGAILCFLAYSIQAATEEEPQNDNLYLGVVLSAVVIITGCFSYYQEAKSSKIMESFKNMVPQQALVIRNGEKMSINAEEVVVGDLVEVKGGDRIPADLRIISANGCKVDNSSLTGESEPQTRSPDFTNENPLETRNIAFFSTNCVEGTARGIVVYTGDRTVMGRIATLASGLEGGQTPIAAEIEHFIHIITGVAVFLGVSFFILSLILEYTWLEAVIFLIGIIVANVPEGLLATVTVCLTLTAKRMARKNCLVKNLEAVETLGSTSTICSDKTGTLTQNRMTVAHMWFDNQIHEADTTENQSGVSFDKTSATWLALSRIAGLCNRAVFQANQENLPILKRAVAGDASESALLKCIELCCGSVKEMRERYAKIVEIPFNSTNKYQLSIHKNPNTSEPQHLLVMKGAPERILDRCSSILLHGKEQPLDEELKDAFQNAYLELGGLGERVLGFCHLFLPDEQFPEGFQFDTDDVNFPIDNLCFVGLISMIDPPRAAVPDAVGKCRSAGIKVIMVTGDHPITAKAIAKGVGIISEGNETVEDIAARLNIPVSQVNPRDAKACVVHGSDLKDMTSEQLDDILKYHTEIVFARTSPQQKLIIVEGCQRQGAIVAVTGDGVNDSPALKKADIGVAMGIAGSDVSKQAADMILLDDNFASIVTGVEEGRLIFDNLKKSIAYTLTSNIPEITPFLIFIIANIPLPLGTVTILCIDLGTDMVPAISLAYEQAESDIMKRQPRNPKTDKLVNERLISMAYGQIGMIQALGGFFTYFVILAENGFLPIHLLGLRVDWDDRWINDVEDSYGQQWTYEQRKIVEFTCHTAFFVSIVVVQWADLVICKTRRNSVFQQGMKNKILIFGLFEETALAAFLSYCPGMGVALRMYPLKPTWWFCAFPYSLLIFVYDEVRKLIIRRRPGGWVEKETYY

SEQ ID NO: 31 - protein, 1023 aa, Homo sapiens; identical to SEQ ID NO: 30

SEQ ID NO: 32 - protein, 529 aa, Homo sapiens
MLGFVGRVAAAPASGALRRLTPSASLPPAQLLLRAAPTAVHPVRDYAAQTSPSPKAGAATGRIVAVIGAVVDVQFDEGLPPILNALEVQGRETRLVLEVAQHLGESTVRTIAMDGTEGLVRGQKVLDSGAPIKIPVGPETLGRIMNVIGEPIDERGPIKTKQFAPIHAEAPEFMEMSVEQEILVTGIKVVDLLAPYAKGGKIGLFGGAGVGKTVLIMELINNVAKAHGGYSVFAGVGERTREGNDLYHEMIESGVINLKDATSKVALVYGQMNEPPGARARVALTGLTVAEYFRDQEGQDVLLFIDNIFRFTQAGSEVSALLGRIPSAVGYQPTLATDMGTMQERITTTKKGSITSVQAIYVPADDLTDPAPATTFAHLDATTVLSRAIAELGIYPAVDPLDSTSRIMDPNIVGSEHYDVARGVQKILQDYKSLQDIIAILGMDELSEEDKLTVSRARKIQRFLSQPFQVAEVFTGHMGKLVPLKETIKGFQQILAGEYDHLPEQAFYMVGPIEEAVAKADKLAEEHSS

SEQ ID NO: 33 - protein, 935 aa, Homo sapiens [sequence omitted]

SEQ ID NO: 34 - protein, 129 aa, Homo sapiens
MASRLLRGAGTLAAQALRARGPSGAAAMRSMASGGGVPTDEEQATGLEREIMLAAKKGLDPYNVLAPKGASGTREDPNLVPSISNKRIVGCICEEDNTSVVWFWLHKGQAQRCPRCGAHYKLVPQQLAH

SEQ ID NO: 35 - protein, 325 aa, Homo sapiens
MAAAAASLRGVVLGPRGAGLPGARARGLLCSARPGQLPLRTPQAVALSSKSGLSRGRKVMLSALGMLAAGGAGLAVALHSAVSASDLELHPPSYPWSHRGLLSSLDHTSIRRGFQVYKQVCASCHSMDFVAYRHLVGVCYTEDEAKELAAEVEVQDGPNEDGEMFMRPGKLFDYFPKPYPNSEAARAANNGALPPDLSYIVRARHGGEDYVFSLLTGYCEPPTGVSLREGLYFNPYFPGQAIAMAPPIYTDVLEFDDGTPATMSQIAKDVCTFLRWASEPEHDHRKRMGLKMLMMMALLVPLVYTIKRHKWSVLKSRKLAYRPPK

SEQ ID NO: 36 - protein, 380 aa, Homo sapiens [sequence omitted]

SEQ ID NO: 37 - protein, 334 aa, Homo sapiens
GKVKVGVDGFGRIGRLVTRAAFNSGKVDIVAINDPFIDLHYMVYMFQYDSTHGKFHGTVKAEDGKLVIDGKAITIFQERDPENIKWGDAGTAYVVESTGVFTTMEKAGAHLKGGAKRIVISAPSADAPMFVMGVNHFKYANSLKIISNASCTTNCLAPLAKVIHDHFGIVEGLMTTVHAITATQKTVDSPSGKLWRGGRGAAQNLIPASTGAAKAVGKVIPELDGKLTGMAFRVPTANVSVLDLTCRLEKPAKYDDIKKVVKEASEGPLKGILGYTEDEVVSDDFNGSNHSSIFDAGAGIELNDTFVKLVSWYDNEFGYSERVVDLMAHMASKE

SEQ ID NO: 38 - protein, 314 aa, Homo sapiens [sequence omitted]

SEQ ID NO: 39 - protein, 201 aa, Homo sapiens [sequence omitted]

SEQ ID NO: 40 - protein, 153 aa, Homo sapiens [sequence omitted]

SEQ ID NO: 41 - protein, 199 aa, Homo sapiens
MTERRVPFSLLRGPSWDPFRDWYPHSRLFDQAFGLPRLPEEWSQWLGGSSWPGYVRPLPPAAIESPAVAAPAYSRALSRQLSSGVSEIRHTADRWRVSLDVNHFAPDELTVKTKDGVVEITGKHEERQDEHGYISRCFTRKYTLPPGVDPTQVSSSLSPEGTLTVEAPMPKLATQSNEITIPVTFESRAQLGGRSCKIR

SEQ ID NO: 42 - protein, 732 aa, Homo sapiens
MPEETQTQDQPMEEEEVETFAFQAEIAQLMSLIINTFYSNKEIFLRELISNSSDALDKIRYETLTDPSKLDSGKELHINLIPNKQDRTLTIVDTGIGMTKADLINNLGTIAKSGTKAFMEALQAGADISMIGQFGVGFYSAYLVAEKVTVITKHNDDEQYAWESSAGGSFTVRTDTGEPMGRGTKVILHLKEDQTEYLEERRIKEIVKKHSQFIGYPITLFVEKERDKEVSDDEAEEKEDKEEEKEKEEKESEDKPEIEDVGSDEEEEKKDGDKKKKKKIKEKYIDQEELNKTKPIWTRNPDDITNEEYGEFYKSLTNDWEDHLAVKHFSVEGQLEFRALLFVPRRAPFDLFENRKKKNNIKLYVRRVFIMDNCEELIPEYLNFIRGVVDSEDLPLNISREMLQQSKILKVIRKNLVKKCLELFTELAEDKENYKKFYEQFSKNIKLGIHEDSQNRKKLSELLRYYTSASGDEMVSLKDYCTRMKENQKHIYYITGETKDQVANSAFVERLRKHGLEVIYMIEPIDEYCVQQLKEFEGKTLVSVTKEGLELPEDEEEKKKQEEKKTKFENLCKIMKDILEKKVEKVVVSNRLVTSPCCIVTSTYGWTANMERIMKAQALRDNSTMGYMAAKKHLEINPDHSIIETLRQKAEADKNDKSVKDLVILLYETALLSSGFSLEDPQTHANRIYRMIKLGLGIDEDDPTADDTSAAVTEEMPPLEGDDDTSRMEEVD

SEQ ID NO: 43 - protein, 732 aa, Homo sapiens; identical to SEQ ID NO: 42

SEQ ID NO: 44 - protein, 1390 aa, Homo sapiens [sequence omitted]

SEQ ID NO: 45 - protein, 359 aa, Homo sapiens [sequence omitted]

SEQ ID NO: 46 - protein, 573 aa, Homo sapiens
MLRLPTVFRQMRPVSRVLAPHLTRAYAKDVKFGADARALMLQGVDLLADAVAVTMGPKGRTVIIEQSWGSPKVTKDGVTVAKSIDLKDKYKNIGAKLVQDVANNTNEEAGDGTTTATVLARSIAKEGFEKISKGANPVEIRRGVMLAVDAVIAELKKQSKPVTTPEEIAQVATISANGDKEIGNIISDAMKKVGRKGVITVKDGKTLNDELEIIEGMKFDRGYISPYFINTSKGQKCEFQDAYVLLSEKKISSIQSIVPALEIANAHRKPLVIIAEDVDGEALSTLVLNRLKVGLQVVAVKAPGFGDNRKNQLKDMAIATGGAVFGEEGLTLNLEDVQPHDLGKVGEVIVTKDDAMLLKGKGDKAQIEKRIQEIIEQLDVTTSEYEKEKLNERLAKLSDGVAVLKVGGTSDVEVNEKKDRVTDALNATRAAVEEGIVLGGGCALLRCIPALDSLTPANEDQKIGIEIIKRTLKIPAMTIAKNAGVEGSLIVEKIMQSSSEVGYDAMAGDFVNMVEKGIIDPTKVVRTALLDAAGVASLLTTAEVVVTEIPKEEKDPGMGAMGGMGGGMGGGMF

SEQ ID NO: 47 - protein, 418 aa, Homo sapiens
MSLSNKLTLDKLDVKGKRVVMRVDFNVPMKNNQITNNQRIKAAVPSIKFCLDNGAKSVVLMSHLGRPDGVPMPDKYSLEPVAVELKSLLGKDVLFLKDCVGPEVEKACANPAAGSVILLENLRFHVEEEGKGKDASGNKVKAEPAKIEAFRASLSKLGDVYVNDAFGTAHRAHSSMVGVNLPQKAGGFLMKKELNYFAKALESPERPFLAILGGAKVADKIQLINNMLDKVNEMIIGGGMAFTFLKVLNNMEIGTSLFDEEGAKIVKDLMSKAEKNGVKITLPVDFVTADKFDENAKTGQATVASGIPAGWMGLDCGPESSKKYAEAVTRAKQIVWNGPVGVFEWEAFARGTKALMDEVVKATSRGCITIIGGGDTATCCAKWNTEDKVSHVSTGGGASLELLEGKVLPGVDALSNIL

SEQ ID NO: 48 - protein, 524 aa, Homo sapiens [sequence omitted]

SEQ ID NO: 49 - protein, 928 aa, Homo sapiens
MPPKTPRKTAATAAAAAAEPPAPPPPPPPEEDPEQDSGPEDLPLVRLEFEETEEPDFTALCQKLKIPDHVRERAWLTWEKVSSVDGVLGGYIQKKKELWGICIFIAAVDLDEMSFTFTELQKNIEISVHKFFNLLKEIDTSTKVDNAMSRLLKKYDVLFALFSKLERTCELIYLTQPSSSISTEINSALVLKVSWITFLLAKGEVLQMEDDLVISFQLMLCVLDYFIKLSPPMLLKEPYKTAVIPINGSPRTPRRGQNRSARIAKQLENDTRIIEVLCKEHECNIDEVKNVYFKNFIPFMNSLGLVTSNGLPEVENLSKRYEEIYLKNKDLDARLFLDHDKTLQTDSIDSFETQRTPRKSNLDEEVNVIPPHTPVRTVMNTIQQLMMILNSASDQPSENLISYFNNCTVNPKESILKRVKDIGYIFKEKFAKAVGQGCVEIGSQRYKLGVRLYYRVMESMLKSEEERLSIQNFSKLLNDNIFHMSLLACALEVVMATYSRSTSQNLDSGTDLSFPWILNVLNLKAFDFYKVIESFIKAEGNLTREMIKHLERCEHRIMESLAWLSDSPLFDLIKQSKDREGPTDHLESACPLNLPLQNNHTAADMYLSPVRSPKKKGSTTRVNSTANAETQATSAFQTQKPLKSTSLSLFYKKVYRLAYLRLNTLCERLLSEHPELEHIIWTLFQHTLQNEYELMRDRHLDQIMMCSMYGICKVKNIDLKFKIIVTAYKDLPHAVQETFKRVLIKEEEYDSIIVFYNSVFMQRLKTNILQYASTRPPTLSPIPHIPRSPYKFPSSPLRIPGGNIYISPLKSPYKISEGLPTPTKMTPRSRILVSIGESFGTSEKFQKINQMVCNSDRVLKRSAEGSNPPKPLKKLRFDIEGSDEADGSKHLPGESKFQQKLAEMTSTRTRMQKQKMNDSMDTSNKEEK

SEQ ID NO: 50 - protein, 248 aa, Homo sapiens
APSRKFFVGGNWKMNGRKKNLGELITTLNAAKVPADTEVVCAPPTAYIDFARQKLDPKIAVAAQNCYKVTNGAFTGEISPGMIKDCGATWVVLGHSERRHVFGESDELIGQKVAHALSEGLGVIACIGEKLDEREAGITEKVVFEQTKVIADNVKDWSKVVLAYEPVWAIGTGKTATPQQAQEVHEKLRGWLKSNVSDAVAQSTRIIYGGSVTGATCKELASQPDVDGFLVGGASLKPEFVDIINAKQ

SEQ ID NO: 51 - protein, 284 aa, Homo sapiens
MDAIKKKMQMLKLDKENAIDRAEQAEADKKQAEDRCKQLEEEQQALQKKLKGTEDEVEKYSESVKEAQEKLEQAEKKATDAEADVASLNRRIQLVEEELDRAQERLATALQKLEEAEKAADESERGMKVIENRAMKDEEKMELQEMQLKEAKHIAEDSDRKYEEVARKLVILEGELERSEERAEVAESKCGDLEEELKIVTNNLKSLEAQADKYSTKEDKYEEEIKLLEEKLKEAETRAEFAERSVAKLEKTIDDLEDEVYAQKMKYKAISEELDNALNDITSL

SEQ ID NO: 52 - protein, 210 aa, Homo sapiens
MADGSSDAAREPRPAPAPIRRRSSNYRAYATEPHAKKKSKISASRKLQLKTLLLQIAKQELEREAEERRGEKGRALSTRCQPLELAGLGFAELQDLCRQLHARVDKVDEERYDIEAKVTKNITEIADLTQKIFDLRGKFKRPTLRRVRISADAMMQALLGARAKESLDLRAHLKQVKKEDTEKENREVGDWRKNIDALSGMEGRKKKFES

SEQ ID NO: 53 - protein, 543 aa, Homo sapiens
DFTQEEWGQLDPTQRILYRDVMLETFGYLLSIGPELPKPEVISQLEQGTELWVAERGTTQGCHPAWEPRSESQASRKEEGLPEEEPSHVTGREGFPTDAPYPTTLGKDRECQSQSLALKEQNNLKQLEFGLKEAPVQDQAYKTLRLRENCVLSSSPNPFPEISRGEYLYTYDSQITDSEHNSSLVSQQTGSPGKQPGENSDCHRDSSQAIPITELTKSQVQDKPYKCTDCGKSFNHNAHLTVHKRIHTGERPYMCKECGKAFSQNSSLVQHERIHTGDKPYKCAECGKSFCHSTHLTVHRRIHTGEKPYECQDCGRAFNQNSSLGRHKRTHTGEKPYTCSVCGKSFSRTTCLFLHLRTHTEERPYECNHCGKGFRHSSSLAQHQRKHAGEKPFECRQRLIFEQTPALTKHEWTEALGCDPPLSQDERTHRSDRPFKCNQCGKCFIQSSHLIRHQITHTREEQPHGRSRRREQSSSRNSHLVQHQHPNSRKSSAGGRKAGQPESRALALFDIQKIMQEKNPVHVIGVEEPSVGASMLFDIREST

SEQ ID NO: 54 - protein, 418 aa, Homo sapiens [sequence omitted]

SEQ ID NO: 55 - protein, 604 aa, Homo sapiens
MKWVTFISLLFLFSSAYSRGVFRRDAHKSEVAHRFKDLGEENFKALVLIAFAQYLQQCPFEDHVKLVNEVTEFAKTCVADESAENCDKSLHTLFGDKLCTVATLRETYGEMADCCAKQEPERNECFLQHKDDNPNLPRLVRPEVDVMCTAFHDNEETFLKKYLYEIARRHPYFYAPELLFFAKRYKAAFTECCQAADKAACLLPKLDELRDEGKASSAKQRLKCASLQKFGERAFKAWAVARLSQRFPKAEFAEVSKLVTDLTKVHTECCHGDLLECADDRADLAKYICENQDSISSKLKECCEKPLLEKSHCIAEVENDEMPADLPSLAADFVESKDVCKNYAEAKDVFLGMFLYEYARRHPDYSVVLLLRLAKTYETTLEKCCAAADPHECYAKVFDEFKPLVEEPQNLIKQNCELFEQLGEYKFQNALLVRYTKKVPQVSTPTLVEVSRNLGKVGSKCCKHPEAKRMPCAEDYLSVVLNQLCVLHEKTPVSDRVTKCCTESLVNRRPCFSALEVDETYVPKEFNAETFTFHADICTLSEKERQIKKQTALVELVKHKPKATKEQLKAVMDDFAAFVEKCCKADDKETCFAEEPTMRIRERK

SEQ ID NO: 56 - protein, 517 aa, Homo sapiens [sequence omitted]

SEQ ID NO: 57 - protein, 920 aa, Homo sapiens
EANQQQQFNRNVEDIELWLYEVEGHLASDDYGKDLTNVQNLQKKHALLEADVAAHQDRIDGVTIQARQFQDAGHFDAENIKKKQEALVARYEALKEPMVARKQKLADSLRLQQLFRDVEDEETWIREKEPIAASTNRGKDLIGVQNLLKKHQALQAEIAGHEPRIKAVTQKGNAMVEEGHFAAEDVKAKLHELNQKWEALKAKASQRRQDLEDSLQAQQYFADANEAESWMREKEPIVGSTDYGKDEDSAEALLKKHEALMSDLSAYGSSIQALREQAQSCRQQVAPTDDETGKELVLALYDYQEKSPREVTMKKGDILTLLNSTNKDWWKVEVNDRQGFVPAAYVKKLDPAQSASRENLLEEQGSIALRQEQIDNQTRITKEAGSVSLRMKQVEELYHSLLELGEKRKGMLEKSCKKFMLFREANELQQWINEKEAALTSEEVGADLEQVEVLQKKFDDFQKDLKANESRLKDINKVAEDLESEGLMAEEVQAVQQQEVYGMMPRDETDSKTASPWKSARLMVHTVATFNSIKELNERWRSLQQLAEERSQLLGSAHEVQRFHRDADETKEWIEEKNQALNTDNYGHDLASVQALQRKHEGFERDLAALGDKVNSLGETAERLTQSHPESAEDLQEKCTELNQAWSSLGKRADQRKAKLGDSHDLQRFLSDFRDLMSWINGIRGLVSSDELAKDVTGAEALLERHQEHRTEIDARAGTFQAFEQFGQQLLAHGHYASPEIKQKLDILDQERADLEKAWVQRRMMLDQCLELQLFHRDCEQAENWMAAREAFLNTEDKGDSLDSVEALIKKHEDFDKAINVQEEKIAALQAFADQLIAAGHYAKGDISSRRNEVLDRWRRLKAQMIEKRSKLGESQTLQQFSRDVDEIEAWISEKLQTASDESYKDPTNIQSKHQKHQAR

SEQ ID NO: 58 - protein, 836 aa, Homo sapiens
NKFIIPGLKLNDLNSVLVMPTFHVPFTDLQVPSCKLDFREIQIYKKLRTSSFALNLPTLPEVKFPEVDVLTKYSQPEDSLIPFFEITVPESQLTVSQFTLPKSVSDGIAALDLNAVANKIADFELPTIIVPEQTIEIPSIKFSVPAGIAIPSFQALTARFEVDSPVYNATWSASLKNKADYVETVLDSTCSSTVQFLEYELNVLGTHKIEDGTLASKTKGTFAHRDFSAEYEEDGKYEGLQEWEGKAHLNIKSPASTDLHLRYQKDKKGISTSAPSPAVGTVGMDMDEDDDFSKWNFYYSPQSSPDKKLTIFKTELRVRESDEETQIKVNWEEEAASGLLTSLKDNVPKATGVLYDYVNKYHWEHTGLTLREVSSKLRRNLQDHAEWVYQGAIREIDDIDERFQKGASGTTGTYQEWKDKAQNLYQELLTQEGQASFQGLKDNVFDGLVRVTQEFHMKVKHLIDSLIDFLNFPRFQFPGKPGIYTREELCTMFIREVGTVLSQVYSKVHNGSEILFSYFQDLVITLPFELRKHKLIDVISMYRELLKDLSKEAQEVFKAIQSLKTTEVLRNLQDLLQFIFQLIEDNIKQLKEMKFTYLINYIQDEINTIFNDYIPYVFKLLKENLCLNLHKFNEFIQNELQEASQELQQIHQYIMALREEYFDPSIVGWTVKYYELEEKIVSLIKNLLVALKDFHSEYIVSASNFTSQLSSQVEQFLHRNIQEYLSILTDPDGKGKEKIAELSATAQEIIKSQAIATKKIISDYHQQFRYKLQDFSDQLSDYYEKFIAESKRLIDLSIQNYHTFLIYITELLKKLQSTTVMNPYMKLAPGELTIIL

SEQ ID NO: 59 - protein, 402 aa, Homo sapiens
MAPWPHENSSLAPWPDLPTLAPNTANTSGLPGVPWEAALAGALLALAVLATVGGNLLVIVAIAWTPRLQTMTNVFVTSLAAADLVMGLLVVPPAATLALTGHWPLGATGCELWTSVDVLCVTASIETLCALAVDRYLAVTNPLRYGALVTKRCARTAVVLVWVVSAAVSFAPIMSQWWRVGADAEAQRCHSNPRCCAFASNMPYVLLSSSVSFYLPLLVMLFVYARVFVVATRQLRLLRGELGRFPPEESPPAPSRSLAPAPVGTCAPPEGVPACGRRPARLLPLREHRALCTLGLIMGTFTLCWLPFFLANVLRALGGPSLVPGPAFLALNWLGYANSAFNPLIYCRSPDFRSAFRRLLCRCGRRLPPEPCAAARPALFPSGVPAARSSPAQPRLCQRLDG

SEQ ID NO: 60 - protein, 529 aa, Homo sapiens [sequence omitted]

SEQ ID NO: 61 - protein, 457 aa, Homo sapiens [sequence omitted]

SEQ ID NO: 62 - protein, 227 aa, Homo sapiens
RGLLSSLDHTSIRRGFQVYKQVCASCHSMDFVAYRHLVGVCYTEDEAKELAAEVEVQDGPNEDGEMFMRPGKLFDYFPKPYPNSEAARAANNGALPPDLSYIVRARHGGEDYVFSLLTGYCEPPTGVSLREGLYFNPYFPGQAIAMAPPIYTDVLEFDDGTPATMSQIAKDVCTFLRWASEPEHDHRKRMGLKMLMMMALLVPLVYTIKRHKWSVLKSRKLAYRPPK

SEQ ID NO: 63 - protein, 49 aa, Homo sapiens
IETQSTSSEELVPSPPSPLPPPRVYKPCFVCQDKSSGYHYGVSACEGCK

SEQ ID NO: 64 - protein, 151 aa, Homo sapiens [sequence omitted]

SEQ ID NO: 65 - protein, 2491 aa, Homo sapiens [sequence omitted]

SEQ ID NO: 66 - protein, 869 aa, Homo sapiens
RATPPSPISACHSTMGRKLDPTKEKRGPGRKARKQKGAETELVRFLPAVSDENSKRLSSRARKRAAKRRLGSVEAPKTNKSPEAKPSPGKLPKGISAGAVQTAGKKGPQSLFNAPRGKKRPAPGSDEEEEEEDSEEDGMVNHGDLWGSEDDADTVDDYGADSNSEDEEEGEALLPIERAARKQKAREAAAGIQWSEEETEDEEEEKEVTPESGPPKVEEADGGLQINVDEEPFVLPPAGEMEQDAQAPDLQRVHKRIQDIVGILRDFGAQREEGRSRSEYLNRLKKDLAIYYSYGDFLLGKLMDLFPLSELVEFLEANEVPRPVTLRTNTLKTRRRDLAQALINRGVNLDPLGKWSKTGLVVYDSSVPIGATPEYLAGHYMLQGASSMLPVMALAPQEHERILDMCCAPGGKTSYMAQLMKNTGVILANDANAERLKSVVGNLHRLGVTNTIISHYDGRQFPKVVGGFDRVLLDAPCSGTGVISKDPAVKTNKDEKDILRCAHLQKELLLSAIDSVNATSKTGGYLVYCTCSITVEENEWVVDYALKKRNVRLVPTGLDFGQEGFTRFRERRFHPSLRSTRRFYPHTHNMDGFFIAKFKKFSNSIPQSQTGNSETATPTNVDLPQVIPKSENSSQPAKKAKGAGKTKQQLQKQQHPKKASFQKLNGISKGADSELSTVPSVTKTQASSSFQDSSQPAGKAEGIREPKVTGKLKQRSPKLQSSKKVAFLRQNAPPKGTDTQTPAVLSPSKTQATLKPKDHHQPLGRAKGVEKQQFAEQPFEKAAFQKQNDTPKGLSLPLCLPSVPAAPHQQRGRNLSPGATASCCYLRWLKTRRVAHCHCHQVGTLASVRMPSLLCIPMKFNTHFKTSGH

SEQ ID NO: 67 - protein, 405 aa, Homo sapiens
TVGDDNEEAKRKSPKKKEKCEYKKKAKNPKSPKVQAVKDWANQRCSSPKGSARNSLVKAKRKGSVSVCSKESPSSSSESESCDESISDGPSKVTLEARNSSEKLPTELSKEEPSTKNTTADKLAIKLGFSLTPSKGKTSGTTSSSSDSSAESDDQCLMSSSTPECAAGFLKTVGLFAGRGRPGPGLSSQTAGAAGWRRSGSNGGGQAPGASPSVSLPASLGRGWGREENLFSWKGAKGRGMRGRGRGRGHPVSCVVNRSTDNQRQQQLNDVVKNSSTIIQNPVETPKKDYSLLPLLAAAPQVGEKIAFKLLELTSSYSPDVSDYKEGRILSHNPETQQVDIEILSSLPALREPGKFDLVYHNENGAEVVEYAVTQESKITVFWKELIDPRLIIESPSNTSSTEPA

SEQ ID NO: 68 - protein, 321 aa, Homo sapiens [sequence omitted]

SEQ ID NO: 69 - protein, 173 aa, Homo sapiens
SCVGFYSVFLFSLCPLGNPQGPPPQGGNKPQGPPPPPGKPQGPPPQGGNKPQGPPPPGKPQGPPPQGGKRSRSPRSPPGKPQGPPPQGGNQPQGPPPPPGKPQGPPPQGGNKPQGPPPPGKPQGPPPQGDKSQSPRSPRKPQGPPPQGGNQPQGPPPPPGKPQGPPQQGGNRP

SEQ ID NO: 70 - protein, 111 aa, Homo sapiens [sequence omitted]

SEQ ID NO: 71 - protein, 111 aa, Homo sapiens [sequence omitted]

SEQ ID NO: 72 - protein, 248 aa, Homo sapiens; identical to SEQ ID NO: 50

SEQ ID NO: 73 - protein, 102 aa, Homo sapiens [sequence omitted]

SEQ ID NO: 74 - protein, 153 aa, Homo sapiens
ATKAVCVLKGBGPVZGIIBFZZKESNGPVKVWGSIKGLTEGLHGFHVHEFGDNTAGCTSAGPHFNPLSRKHGGPKDEERHVGBLGBVTABKBGVABVSIZBSVISLSGBHCIIGRTLVVHEKADDLGKGGNEESTKTGNAGSRLACGVIGIAQ

SEQ ID NO: 75 - protein, 171 aa, Homo sapiens [sequence omitted]

SEQ ID NO: 76 - protein, 842 aa, Homo sapiens [sequence omitted]

SEQ ID NO: 77 - protein, 104 aa, Homo sapiens
RSFFSFLGEAFDGARDMWRAYSDMREANYIGSDKYFHARGNYDAAKRGPGGAWAAEVISNARENIQRLTGHGAEDSLADQAANKWGRSGRDPNHFRPAGLPEKY

SEQ ID NO: 78 - protein, 195 aa, Homo sapiens [sequence omitted]

SEQ ID NO: 79 - protein, 594 aa, Homo sapiens
FGGSRAGPLSGKKFGNPGEKLVKKKWNLDELPKFEKNFYQEHPDLARRTAQEVETYRRSKEITVRGHNCPKPVLNFYEANFPANVMDVIARQNFTEPTAIQAQGWPVALSGLDMVGVAQTGSGKTLSYLLPAIVHINHQPFLERGDGPICLVLAPTRELAQQVQQVAAEYCRACRLKSTCIYGGAPKGPQIRDLERGVEICIATPGRLIDFLECGKTNLRRTTYLVLDEADRMLDMGFEPQIRKIVDQIRPDRQTLMWSATWPKEVRQLAEDFLKDYIHINIGALELSANHNILQIVDVCHDVEKDEKLIRLMEEIMSEKENKTIVFVETKRRCDELTRKMRRDGWPAMGIHGDKSQQERDWVLNEFKHGKAPILIATDVASRGLDVEDVKFVINYDYPNSSEDYIHRIGRTARSTKTGTAYTFFTPNNIKQVSDLISVLREANQAINPKLLQLVEDRGSGRSRGRGGMKDDRRDRYSAGKRGGFNTFRDRENYDRGYSSLLKRDFGAKTQNGVYSAANYTNGSFGSNFVSAGIQTSFRTGNPTGTYQNGYDSTQQYGSNVPNMHNGMNQQAYAYPATAAAPMIGYPMPTGYSQ

SEQ ID NO: 80 - protein, 44 aa, Homo sapiens
IHSLPPEGKLGIMELAVGLTSCFVTFLLPAGWILSHLETYRRPE

SEQ ID NO: 81 - protein, 249 aa, Homo sapiens [sequence omitted]

SEQ ID NO: 82 - protein, 779 aa, Homo sapiens [sequence omitted]

SEQ ID NO: 83 - protein, 1452 aa, Homo sapiens [sequence omitted]

SEQ ID NO: 84 - protein, 146 aa, Homo sapiens [sequence omitted]

SEQ ID NO: 85 - protein, 245 aa, Homo sapiens
DEPPQSPWDRVKDLATVYVDVLKDSGRDYVSQFQGSALGKQLNLKLLWDDVTSTFSKLRQELGPVTEEWFNDLQEKLNLEKETGELRQEMSKDLEEVKAKVQPYLDDFQKKWQEMELYRQKVEPLRAELQEGARQKLHELQEKLSPLGEEMRDRARAHVDALRTHLAPYSDELRQRLAARLEALKENGAGRLAEYHAKATEHLSTLSEKAKPALEDLRQGLLPVLESFKVSFLSALEEYTKLNTQ

SEQ ID NO: 86 - protein, 245 aa, Homo sapiens; identical to SEQ ID NO: 85

SEQ ID NO: 87 - protein, 218 aa, Homo sapiens
IVGGRRARPHAWPFMVSLQLRGGHFCGATLIAPNFVMSAAHCVANVNVRAVRVVLGAHNLSRREPTRQVFAVQRIFEDGYDPVNLLNDIVILQLNGSATINANVQVAQLPAQGRRLGNGVQCLAMGWGLLGRNRGIASVLQELNVTVVTSLCRRSNVCTLVRGRQAGVCFGDSGSPLVCNGLIHGIASFVRGGCASGLYPDAFAPVAQFVNWIDSIIQ

SEQ ID NO: 88 - protein, 292 aa, Homo sapiens [sequence omitted]

SEQ ID NO: 89 - protein, 12 aa, Homo sapiens
TFIAIKPDGVQR

SEQ ID NO: 90 - protein, 282 aa, Homo sapiens
AVPPTYADLGKSARDVFTKGYGFGLIKLDLKTKSENGLEFTSSGSANTETTKVTGSLETKYRWTEYGLTFTEKWNTDNTLGTEITVEDQLARGLKLTFDSSFSPNTGKKNAKIKTGYKREHINLGCDMDFDIAGPSIRGALVLGYEGWLAGYQMNFETAKSRVTQSNFAVGYKTDEFQLHTNVNDGTEFGGSIYQKVNKKLETAVNLAWTAGNSNTRFGIAAKYQIDPDACFSAKVNNSSLIGLGYTQTLKPGIKLTLSALLDGKNVNAGGHKLGLGLEFQA

SEQ ID NO: 91 - protein, 24 aa, Homo sapiens
QFFDLMKLFEVGGSPSNARYLFLG

SEQ ID NO: 92 - protein, 1003 aa, Homo sapiens
MFHLRTCAAKLRPLTASQTVKTFSQNRPAAARTFQQIRCYSAPVAAEPFLSGTSSNYVEEMYCAWLENPKSVHKSWDIFFRNTNAGAPPALLPESPSLSRGSLAAVAHAQSLVEAQPNVDKLVEDHLAVQSLIRAYQIRGHHVAQLDPLGILDADLDSSVAPLTLSHPQTNLGSMAWMSLTSTRSSTCPPTTFIGGQESALPLREIIRRLEMAYCQHIGVEFMFINDLEQCQWIRQKFETPGIMQFTNEEKRTLLARLVRSTRFEEFLQRKWSSEKRFGLEGCEVLIPALKTIIDKSSENGVDYVIMGMPHRGRLNVLANVIRKELEQIFCQFDSKLEAADEGLRRCEVPPGHVSPQDQSCHRPGTLPCPWWPNPSHLEAADPVVMGKTKAEQFYCGDTEGKKVMSILLHGDAAFAGQGIVYETFHLSDLPSYTTHGTVHVVVNNQIGFTTDPRMARSSPYPTDVARVVNAPIFHVNSDDPEAVMYVCKVAAEWRSTFHKDVVVDLVCYRRNGHNEMDEPMFTQPLMYKQIRKQKPVLQKYAELLVSQGVVNQPEYEEEISKYDKICEEAFARSKDEKILHIKHWLDSPWPGFFTLDGQPRSMSCPSTGLTEDILTHIGNVASSVPVENFTIHGGLSRILKTRGEMVKNRTVDWALAEYMAFGSLLKEGIHIRLSGQDVERGTFSHRHHVLHDQNVDKRTCIPMNHLWPNQAPYTVCNSSLSEYGVLGFGAGLRMASPNALVLWEAQFGDFHNTAQCIIDQFICPGQAKWVRQNGIVLLLPLGMEGMGPEHSSGPPRAFLQMCNDDPDVLPDLKEANFDINQLYDCNWVVVNCSTPGNFFHVLRRQILLPFRKPLIIFTPKSLLRHPEARSSFDEMLPGTHFQRVIPEDGPAAQNPENVKRLLFCTGKVYYDLTRERKARDMVGQVAITRIEHVSPFPFDLLLKEVQKYPNAELAWCQEEHKNQGYYDYVKPRLRTTISRAKPVWYAGRDPAAAPRTGNKKTH

SEQ ID NO: 93 - protein, 99 aa, Homo sapiens
RSKWSERTRKPLEALYGYDYFARTCEKWVDGIRQFKHLPDGNICRHLLPRVQCPALIVHGEKDPLVPRFHADFIHKHVKASRLHLMPEGKHNLHLRFAD

SEQ ID NO: 94 - protein, 445 aa, Homo sapiens
MDEEYDVIVLGTGLTECILSGIMSVNGKKVLHMDRNPYYGGESASITPLEDLYKRFKIPGSPPESMGRGRDWNVDLIPKFLMANGQLVKMLLYTEVTRYLDFKVTEGSFVYKGGKIYKVPSTEAEALASSLMGLFEKRRFRKFLVYVANFDEKDPRTFEGIDPKKTTMRDVYKKFDLGQDVIDFTGHALALYRTDDYLDQPCYETINRIKLYSESLARYGKSPYLYPLYGLGELPQGFARLSAIYGGTYMLNKPIEEIIVQNGKVIGVKSEGEIARCKQLICDPSYVKDRVEKVGQVIRVICILSHPIKNTNDANSCQIIIPQNQVNRKSDIYVCMISFAHNVAAQGKYIAIVSTTVETKEPEKEIRPALELLEPIEQKFVSISDLLVPKDLGTESQIFISRTYDATTHFETTCDDIKNIYKRMTGSEFDFEEMKRKKNDIYGED

SEQ ID NO: 95 - protein, 143 aa, Homo sapiens
CFVLFVKLFPGLFLQHLFLSLTDSFHAKVTQTPGHLVKGKGQKTKMDCTPEKGHTFVYWYQQNQNKEFMLLISFQNEQVLQETEMHKKRFSSQCPKNAPCSLAILSSEPGDTALYLCASSLGQGESPLHFGNGTRLTVTEDLN

SEQ ID NO: 96 - protein, 328 aa, Homo sapiens [sequence omitted]

SEQ ID NO: 97 - protein, 123 aa, Homo sapiens
QVQLVQSGAEVRKPGSSVKVSCKASGGTFSTYAFSWVRHSPGQGLEWMGGITPMFGTARYAQNFQGRVTITADESTRTAYMELSSLRSEDTAVYYCARGWLDPSMATTPFGFWGQGTVVTVSS

SEQ ID NO: 98 - protein, 364 aa, Homo sapiens [sequence omitted]

SEQ ID NO: 99 - protein, 223 aa, Homo sapiens [sequence omitted]

SEQ ID NO: 100 - protein, 40 aa, Homo sapiens
PFSVCGEYFPRVKLKLIFFFSKHKQSLLGGDMDMGNPGTL

SEQ ID NO: 101 - protein, 508 aa, Homo sapiens [sequence omitted]

SEQ ID NO: 102 - protein, 725 aa, Homo sapiens
RKSYYSKDPSRAEKREIKCPTPGCDGTGHVTGLYPHHRSLSGCPHKDRIPPEILAMHENVLKCPTPGCTGQGHVNSNRNTHRSLSGCPIAAAEKLAKSHEKQQPQTGDPSKSSSNSDRILRPMCFVKQLEVPPYGSYRPNVAPRHTQGQLGKELEKFSKVTFDYASFDAQVFGKRMLAPKIQTSETSPKAFQSKPFPKASSPRHSPSSSYVRSTSSSSAGFDYSQDAEAAHMAATAILNLSTRCWEMPENLSTKPQDLPSKSVDIEVDENGTLDLSMHKHRKRENAFPSSSSCSSSPGVKSPDASQRHSSTSAPSSSMTSPQSSQASRQDEWDRPLDYTKPSRLREEEPEESEPAAHSFASSEADDQEVSEENFEERKYPGEVTLTNFKLKFLSKDIKKELLTCPTPGCDGSGHITGNYASHRSLSGCPLADKSLRNLMATHSADLKCPTPGCDGSGHITGNYASHRSLSGCPRAKKSGVKVAPTKDDKEDPELMKCPVPGCVGLGHISGKYASHRSASGCPLAARRQKEGSLNGSSFSWKSLKNEDPTCPTPGCDGSGHTIGSFLTHRSLSGCPRATFAGKKGKLSGDEVLSPKFKTSDVLENDEEIKQLNQEIRDLNESNSEMEAAMVQLQSQISSMEKNLKNIEEENKLIEEQNEALFLELSGLSQALIQSLANIHLPHMEPICEQNFVPYVSTLTDMYSNQAPENKDLLESIKQAVRGIQV

SEQ ID NO: 103 - protein, 275 aa, Homo sapiens
FQRSTPAITLESPDIKYPLRLIDREIISHDTRRFRFALPSPQHILGLPVGQHIYLSARIDGNLVVRPYTPISSDDDKGFVDLVIKVYFKDTHPKFPAGGKMSQYLESMQIGDTIEFRGPSGLLVYQGKGKFAIRPDKKSNPIIRTVKSVGMIAGGTGITPMLQVIRAIMKDPDDHTVCHLLFANQTEKDILLRPELEELRNKHSARFKLWYTLDRAPEAWDYGQGFVNEEMIRDHLPPPEEEPLVLMCGPPPMIQYACLPNLDHVGHPTERCFVF

SEQ ID NO: 104 - protein, 101 aa, Homo sapiens
  VARIANT 5: Xaa = Any Amino Acid
VGIYXGTHVIPNDRKIIWPGGETEKSRGYQMSTRLKIVTIHQEPFVYVKPTLSDGTCKEEFTVNGDPVKKVICTGPNDTSPGSPRHTVPQCCYGFCIDLLI

SEQ ID NO: 105 - protein, 379 aa, Homo sapiens
MGCLGNSKTEDQRNEEKAQREANKKIEKQLQKDKQVYRATHRLLLLGAGESGKSTIVKQMRILHVNGFNGDEKATKVQDIKNNLKEAIETIVAAMSNLVPPVELANPENQFRVDYILSVMNVPDFDFPPEFYEHAKALWEDEGVRACYERSNEYQLIDCAQYFLDKIDVIKQADYVPSDQDLLRCRVLTSGIFETKFQVDKVNFHMFDVGGQRDERRKWIQCFNDVTAIIFVVASSSYNMVIREDNQTNRLQEALNLFKSIWNNRWLRTISVILFLNKQDLLAEKVLAGKSKIEDYFPEFARYTTPEDATPEPGEDPRVTRAKYFIRDEFLRISTASGDGRHYCYPHFTCAVDTENIRRVFNDCRDIIQRMHLRQYELL

SEQ ID NO: 106 - protein, 154 aa, Homo sapiens
MGLSDGEWQLVLNVWGKVEADIPGHGQEVLIRLFKGHPETLEKFDKFKHLKSEDEMKASEDLKKHGATVLTALGGILKKKGHHEAEIKPLAQSHATKHKIPVKYLEFISECIIQVLQSKHPGDFGADAEGAMNKALELFRKDMASNYKELGFQG

SEQ ID NO: 107 - protein, 335 aa, Homo sapiens
WTAPAAVQVTVRDAINQGMDEELERDEKVFLLGEEVAQYDGAYKVSRGLWKKYGDKRIIDTPISEMGFAGIAVGAAMAGLRPICEFMTFNFSMQAIDQVINSAAKTYYMSGGLQPVPIVFRGPNGASAGVAAQHSQCFAAWYGHCPGLKVVSPWNSEDAKGLIKSAIRDNNPVVVLENELMYGVPFEFPPEAQSKDFLIPIGKAKIERQGTHITVVSHSRPVGHCLEAAAVLSKEGVECEVINMRTIRPMDMETIEASVMKTNHLVTVEGGWPQFGVGAEICARIMEGPAFNFLDAPAVRVTGADVPMPYAKILEDNSIPQVKDIIFAIKKTLNI

SEQ ID NO: 108 - protein, 414 aa, Homo sapiens
ETWGHPRRASWVVRSRRCRHCLCFMRKMLAAVSRVLSGASQKPASRVLVASRNFANDATFEIKKCDLHRLEEGPPVTTVLTREDGLKYYRMMQTVRRMELKADQLYKQKIIRGFCHLCDGQEACCVGLEAGINPTDHLITAYRAHGFTFTRGLSVREILAELTGRKGGCAKGKGGSMHMYAKNFYGGNGIVGAQVPLGAGIALACKYNGKDEVCLTLYGDGAANQGQIFEAYNMAALWKLPCIFICENNRYGMGTSVERAAASTDYYKRGDFIPGLRVDGMDILCVREATRFAAAYCRSGKGPILMELQTYRYHGHSMSDPGVSYRTREEIQEVRSKSDPIMLLKDRMVNSNLASVEELKEIDVEVRKEIEDPAQFAAADPEPPLEELGYHIYSSDPPFEVRGANQWIKFKSVS

SEQ ID NO: 109 - protein, 414 aa, Homo sapiens; identical to SEQ ID NO: 108

SEQ ID NO: 110 - protein, 253 aa, Homo sapiens
MATHRLVMVRHGESTWNQENRFCGWFDAELSEKGTEEAKRGAKAIKDAKMEFDICYTSVLKRAIPTLWAILDGTDQMWLPVVRTCRFNERHYGGLTGLNKAETAAKHGEEQVKIWRRSFDIPPPPMDEKHPYYNSISKERRYAGLKPGELPTCESLKDTIARALPFWNEEIVPQIKAGKRVLIAAHGNSLRGIVKHLEGMSDQAIMELNLPTGIPIVYELNKELKPTKPMQFLGDEETVRKAMEAVAAQGKAK

SEQ ID NO: 111 - protein, 133 aa, Homo sapiens [sequence omitted]

SEQ ID NO: 112 - protein, 193 aa, Homo sapiens [sequence omitted]

SEQ ID NO: 113 - protein, 528 aa, Homo sapiens
RRKMAAVVLAATRLLRGSGSWGCSRLRFGPPAYRRFSSGGAYPNIPLSSPLPGVPKPVFATVDGQEKFETKVTTLDNGLRVASQNKFGQFCTVGILINSGSRYEAKYLSGIAHFLEKLAFSSTARFDSKDEILLTLEKHGGICDCQTSRDTTMYAVSADSKGLDTVVALLADVVLQPRLTDEEVEMTRMAVQFELEDLNLRPDPEPLLTEMIHEAAYRENTVGLHRFCPTENVAKINREVLHSYLRNYYTPDRMVLAGVGVEHEHLVDCARKYLLGVQPAWGSAEAVDIDRSVAQYTGGIAKLERDMSNVSLGPTPIPELTHIMVGLESCSFLEEDFIPFAVLNMMMGGGGSFSAGGPGKGMFSRLYLNVLNRHHWMYNATSYHHSYEDTGLLCIHASADPRQVREMVEIITKEFILMGGTVDTVELERAKTQLTSMLMMNLESRPVIFEDVGRQVLATRSRKLPHELCTLIRNVKPEDVKRVASKMLRGKPAVAALGDLTDLPTYEDIQTALSSKDGRLPRTYRLFR

SEQ ID NO: 114 - protein, 491 aa, Homo sapiens
RRFPPAGAVAVIERGVRGGSQRCRTMADQLYLENIDEFVTDQNKIVTYKWLSYTLGVHVNQAKQMLYDYVERKRKENSGAQLHVTYLVSGSLIQNGHSCHKVAVVREDKLEAVKSKLAVTASIHVYSIQKAMLKDSGPLFNTDYDILKSNLQNCSKFSAIQCAAAVPRAPAESSSSSKKFEQSHLHMSSETQANNELTTNGHGPPASKQVSQQPKGIMGMFASKAAAKTQETNKETKTEAKEVTNASAAGNKAPGKGNMMSNFFGKAAMNKFKVNLDSEQAVKEEKIVEQPTVSVTEPKLATPAGLKKSSKKAEPVKVLQKEKKRGKRVALSDDETKETENMRKKRRRIKLPESDSSEDEVFPDSPGAYEAESPSPPPPPSPPLEPVPKTEPEPPSVKSSSGENKRKRKRVLKSKTYLDGEGCIVTEKVYESESCTDSEEELNMKTSSVHRPPAMTVKKEPREERKGPKKGTAALGKANRQVSITGFFQRK

SEQ ID NO: 115 - protein, 396 aa, Homo sapiens
MDMHCKADPFSAMHPGHGGVNQLGGVFVNGRPLPDVVRQRIVELAHQGVRPCDISRQLRVSHGCVSKILGRYYETGSIKPGVIGGSKPKVATPKVVDKIAEYKRQNPTMFAWEIRDRLLAEGICDNDTVPSVSSINRIIRTKVQQPFHPTPDGAGTGVTAPGHTIVPSTASPPVSSASNDPVGSYSINGILGIPRSNGEKRKRDEDVSEGSVPNGDSQSGVDSLRKHLRADTFTQQQLEALDRVFERPSYPDVFQASEHIKSEQGNEYSLPALTPGLDEVKSSLSASTNPELGSNVSGTQTYPVVTGRDMASTTLPGYPPHVPPTGQGSYPTSTLAGMVPEAAVGPSSSLMSKPGRKLAEVPPCVQPTGASSPATRTATPSTRPTTRLGDSATPPY

SEQ ID NO: 116 - protein, 260 aa, Homo sapiens [sequence omitted]

SEQ ID NO: 117 - protein, 119 aa, Homo sapiens
KNFDDYMKSLGVGFATRQVASMTKPTTIIEKNGDILTLKTHSTFKNTEISFKLGVEFDETTADDRKVKSIVTLDGGKLVHLQKWDGQETTLVRELIDGKLILTLTHGTAVCTRTYEKEA

SEQ ID NO: 118 - protein, 1007 aa, Homo sapiens
MKMWLLVSHLVIISITTCLAVSEEDKGFGPIFEEQPINTIYPEESLEGKVSLNCRARASPFPVYKWRMNNGDVDLTSDRYSMVGGNLVINNPDKQKDAGIYYCLASNNYGMVRSTEATLSFGYLDPFPPEERPEVRVKEGKGMVLLCDPPYHFPDDLSYRWLLNEFPVFITMDKRRFVSQTNGNLYIANVEASDKGNYSCFVSSPSITKSVFSKFIPLIPIPERTTKPYPADIVVQFKDVYALMGQNVTLECFALGNPVPDIRWRKVLEPMPSTAEISTSGAVLKIFNIQLEDEGIYECEAENIRGKDKHQARIYVQAFPEWVEHINDTEVDIGSDLYWPCVATGKPIPTIRWLKNGYAYHKGELRLYDVTFENAGMYQCIAENTYGAIYANAELKILALAPTFEMNPMKKKILAAKGGRVIIECKPKAAPKPKFSWSKGTEWLVNSSRILIWEDGSLEINNITRNDGGIYTCFAENNRGKANSTGTLVITDPTRIILAPINADITVGENATMQCAASFDPALDLTFVWSFNGYVIDFNKENIHYQRNFMLDSNGELLIRNAQLKHAGRYTCTAQTIVDNSSASADLVVRGPPGPPGGLRIEDIRATSVALTWSRGSDNHSPISKYTIQTKTILSDDWKDAKTDPPIIEGNMEAARAVDLIPWMEYEFRVVATNTLGRGEPSIPSNRIKTDGAAPNVAPSDVGGGGGRNRELTITWAPLSREYHYGNNFGYIVAFKPFDGEEWKKVTVTNPDTGRYVHKDETMSPSTAFQVKVKAFNNKGDGPYSLVAVINSAQDAPSEAPTEVGVKVLSSSEISVHWEHVLEKIVESYQIRYWAAHDKEEAANRVQVTSQEYSARLENLLPDTQYFIEVGACNSAGCGPPSDMIEAFTKKAPPSQPPRIISSVRSGSRYIITWDHVVALSNESTVTGYKVLYRPDGQHDGKLYSTHKHSIEVPIPRDGEYVVEVRAHSDGGDGVVSQVKISGAPTLSPSLLGLLLPAFGILVYLEF

SEQ ID NO: 119 - protein, 1333 aa, Homo sapiens
MQAQQLPYEFFSEENAPKWRGLLVPALKKVQGQVHPTLESNDDALQYVEELILQLLNMLCQAQPRSASDVEERVQKSFPHPIDKWAIADAQSAIEKRKRRNPLSLPVEKIHPLLKEVLGYKIDHQVSVYIVAVLEYISADILKLVGNYVRNIRHYEITKQDIKVAMCADKVLMDMFHQDVEDINILSLTDEEPSTSGEQTYYDLVKAFMAEIRQYIRELNLIIKVFREPFVSNSKLFSANDVENIFSRIVDIHELSVKLLGHIEDTVEMTDEGSPHPLVGSCFEDLAEELAFDPYESYARDILRPGFHDRFLSQLSKPGAALYLQSIGEGFKEAVQYVLPRLLLAPVYHCLHYFELLKQLEEKSEDQEDKECLKQAITALLNVQSGMEKICSKSLAKRRLSESACRFYSQQMKGKQLAIKKMNEIQKNIDGWEGKDIGQCCNEFIMEGTLTRVGAKHERHIFLFDGLMICCKSNHGQPRLPGASNAEYRLKEKFFMRKVQINDKDDTNEYKHAFEIILKDENSVIFSAKSAEEKNNWMAALISLQYRSTLERMLDVTMLQEEKEEQMRLPSADVYRFAEPDSEENIIFEENMQPKAGIPIIKAGTVIKLIERLTYHMYADPNFVRTFLTTYRSFCKPQELLSLIIERFEIPEPEPTEADRIAIENGDQPLSAELKRFRKEYIQPVQLRVLNVCRHWVEHHFYDFERDAYLLQRMEEFIGTVRGKAMKKWVESITKIIQRKKIARDNGPGHNITFQSSPPTVEWHISRPGFIETFDLLTLHPIEIARQLTLLESDLYRAVQPSELVGSVWTKEDKEINSPNLLKMIRHTTNLTLWFEKCIVETENLEERVAVVSRIIEILQVFQELNNFNGVLEVVSAMNSSPVYRLDHTFEQIPSRQKKILEEAHELSEDHYKKYLAKLRSINPPCVPFFGIYLTNILKTEEGNPEVLKRHGKELINFSKRRKVAEITGEIQQYQNQPYCLRVESDIKRFFENLNPMGNSMEKEFTDYLFNKSLEIEPRNPKPLPRFPKKYSYPLKSPGVRPSNPRPGTMRHPTPLQQEPRKISYSRIPESETESTASAPNSPRTPLTPPPASGASSTTDVCSVFDSDHSSPFHSSNDTVFIQVTLPHGPRSASVSSISLTKGTDEVPVPPPVPPRRRPESAPAESSPSKIMSKHLDSPPAIPPRQPTSKAYSPRYSISDRTSISDPPESPPLLPPREPVRTPDVFSSSPLHLQPPPLGKKSDHGNAFFPNSPSPFTPPPPQTPSPHGTRRHLPSPPLTQEVDLHSIAGPPVPPRQSTSQHIPKLPPKTYKREHTHPSMHRDGPPLLENAHSS

SEQ ID NO: 120 - protein, 1870 aa, Homo sapiens [sequence omitted]

SEQ ID NO: 121 - protein, 333 aa, Homo sapiens
MEENDPKPGEAAAAVEGQRQPESSPGGGSGGGGGSSPGEADTGRRRALMLPAVLQAPGNHQHPHRITNFFIDNILRPEFGRRKDAGTCCAGAGGGRGGGAAAAGGGSGAEGGGGAGGSEQLLGSGSREPRQNPPCAPGAGGPLPAAGSDSPGDGEGGSKTLSLHGGAKKGGDPGGPLDGSLKARGLGGGDLSVSSDSDSSQAGANLGAQPMLWPAWVYCTRYSDRPSSGPRSRKPKKKNPNKEDKRPRTAFTAEQLQRLKAEFQTNRYLTEQRRQSLAQELSLNESQIKIWFQNKRAKIKKATGNKNTLAVHLMAQGLYNHSTTAKEGKSDSE

SEQ ID NO: 122 - protein, 427 aa, Homo sapiens [sequence omitted]

SEQ ID NO: 123 - protein, 721 aa, Homo sapiens
TSGLTTGKIAGAGLLFVGGGIGGTILYAKWDSHFRESVEKTIPYSDKLFEMVLGPAAYNVPLPKKSIQSGPLKISSVSEVMKESKQPASQLQKQKGDTPASATAPTEAAQIISAAGDTLSVPAPAVQPEESLKTDHPEIGEGKPTPALSEEASSSSIRERPPEEVAARLAQQEKQEQVKIESLAKSLEDALRQTASVTLQAIAAQNAAVQAVNAHSNILKAAMDNSEIAGEKKSAQWRTVEGALKERRKAVDEAADALLKAKEELEKMKSVIENAKKKEVAGAKPHITAAEGKLHNMIVDLDNVVKKVQAAQSEAKVVSQYHELVVQARDDFKRELDSITPEVLPGWKGMSVSDLADKLSTDDLNSLIAHAHRRIDQLNRELAEQKATEKQHITLALEKQKLEEKRAFDSAVAKALEHHRSEIQAEQDRKIEEVRDAMENEMRTQLRRQAAAHTDHLRDVLRVQEQELKSEFEQNLSEKLSEQELQFRRLSQEQVDNFTLDINTAYARLRGIEQAVQSHAVAEEEARKAHQLWLSVEALKYSMKTSSAETPTIPLGSAVEAIKANCSDNEFTQALTAAIPPESLTRGVYSEETLRARFYAVQKLARRVAMIDETRNSLYQYFLSYLQSLLLFPPQQLKPPPELCPEDINTFKLLSYASYCIEHGDLELAAKFVNQLKGESRRVAQDWLKEARMTLETKQIVEILTAYASAVGIGTTQVQPE

SEQ ID NO: 124 - protein, 758 aa, Homo sapiens
MLRACQLSGVTAAAQSCLCGKFVLRPLRPCRRYSTSGSSGLTTGKIAGAGLLFVGGGIGGTILYAKWDSHFRESVEKTIPYSDKLFEMVLGPAAYNVPLPKKSIQSGPLKISSVSEVMKESKQPASQLQKQKGDTPASATAPTEAAQIISAAGDTLSVPAPAVQPEESLKTDHPEIGEGKPTPALSEEASSSSIRERPPEEVAARLAQQEKQEQVKIESLAKSLEDALRQTASVTLQAIAAQNAAVQAVNAHSNILKAAMDNSEIAGEKKSAQWRTVEGALKERRKAVDEAADALLKAKEELEKMKSVIENAKKKEVAGAKPHITAAEGKLHNMIVDLDNVVKKVQAAQSEAKVVSQYHELVVQARDDFKRELDSITPEVLPGWKGMSVSDLADKLSTDDLNSLIAHAHRRIDQLNRELAEQKATEKQHITLALEKQKLEEKRAFDSAVAKALEHHRSEIQAEQDRKIEEVRDAMENEMRTQLRRQAAAHTDHLRDVLRVQEQELKSEFEQNLSEKLSEQELQFRRLSQEQVDNFTLDINTAYARLRGIEQAVQSHAVAEEEARKAHQLWLSVEALKYSMKTSSAETPTIPLGSAVEAIKANCSDNEFTQALTAAIPPESLTRGVYSEETLRARFYAVQKLARRVAMIDETRNSLYQYFLSYLQSLLLFPPQQLKPPPELCPEDINTFKLLSYASYCIEHGDLELAAKFVNQLKGESRRVAQDWLKEARMTLETKQIVEILTAYASAVGIGTTQVQPE

SEQ ID NO: 125 - protein, 770 aa, Homo sapiens [sequence omitted]

SEQ ID NO: 126 - protein, 411 aa, Homo sapiens
MGPLSAPPCTQHITWKGVLLTASLLNFWNLPITAQVTIEALPPKVSEGKDVLLLVHNLPQNLAGYIWYKGQLMDLYHYITSYVVDGQINIYGPAYTGRETVYSNASLLIQNVTREDAGSYTLHIIKRGDRTRGVTGYFTFNLYLETPKPSISSSNLNPREAMEAVILTCDPAASDTSYLWWMNGQSLPMTHRLQLSKTNRTLFIFGVTKYIAGPYECEIRNPVSASHSDPVTLNLLLKLPKPYITINNSKPRENKDVLAFTCEPKSENYTYIWWLNGQSLPVSPRVKQPIENRILILPSVTRNETGPYECEIRDRDGGMHSDPVTLNVLYGPDLPSIYPSFTYYRSGENLYLSCFAESNPPAEYFWTINGKFQQSGQKLSIPQITTKHRGLYTCSVRNSATGKESSKSMTV

SEQ ID NO: 127 - protein, 233 aa, Homo sapiens
LGHMVLFPVWFLYSLLMKLFQRSTPAITLESPDIKYPLRLIDREIISHDTRRFRFALPSPQHILGLPVGQHIYLSARIDGNLVVRPYTPISSDDDKGFVDLVIKVYFKDTHPKFPAGGKMSQYLESMQIGDTIEFRGPSGLLVYQGKGKFAIRPDKKSNPIIRTVKSVGMIAGGTGITPMLQVIGAIMKDPDDHTVCHLLFANQTEKDILLRPELEELRNKHSARFKLWYTLD

SEQ ID NO: 128 - protein, 176 aa, Homo sapiens
MGDSEMAVFGAAAPYLRKSEKERLEAQTRPFDLKKDVFVPDDKQEFVKAKIVSREGGKVTAETEYGKTVTVKEDQVMQQNPPKFDKIQDMAMLTFLHEPAVLYNLKERYGSWMIYTYSGLFCVTVNPYKWLPVYTPEVVAAYRGKKRSEAPPHIFSISDNAYQYMLTDRENQSILI

SEQ ID NO: 129 - protein, 21 aa, Homo sapiens
CYTGANSKLTFGKGITLSVRP

SEQ ID NO: 130 - protein, 21 aa, Homo sapiens
CYTGANSKLTFGKGITLSVRP

SEQ ID NO: 131 - protein, 411 aa, Homo sapiens
EAGPAPLSAAAPGAGRGWPRPLAERRKGRGRRQPLRARLNRRRWAAGQGSTVQAATFGPAMAAAPLKVCIVGSGNWGSAVAKIIGNNVKKLQKFASTVKMWVFEETVNGRKLTDIINNDHENVKYLPGHKLPENVVAMSNLSEAVQDADLLVFVIPHQFIHRICDEITGRVPKKALGITLIKGIDEGPEGLKLISDIIREKMGIDISVLMGANIANEVAAEKFCETTIGSKVMENGLLFKELLQTPNFRITVVDDADTVELCGALKNIVAVGAGFCDGLRCGDNTKAAVIRLGLMEMIAFARIFCKGQVSTATFLESCGVADLITTCYGGRNRRVAEAFARTGKTIEELEKEMLNGQKLQGPQTSAEVYRILKQKGLLDKFPLFTAVYQICYESRPVQEMLSCLQSHPEHT

SEQ ID NO: 132 - protein, 763 aa, Homo sapiens [sequence omitted]

SEQ ID NO: 133 - protein, 112 aa, Homo sapiens [sequence omitted]

SEQ ID NO: 134 - protein, 1139 aa, Homo sapiens
MPSGGDQSPPPPPPPPAAAASDEEEEDDGEAEDAAPSAESPTPQIQQRFDELCSRLNMDEAARPEAWDSYRSMSESYTLEGNDLHWLACALYVACRKSVPTVSKGTVEGNYVSLTRILKCSEQSLIEFFNKMKKWEDMANLPPHFRERTERLERNFTVSAVIFKKYEPIFQDIFKYPQEEQPRQQRGRKQRRQPCTVSEIFHFCWVLFIYAKGNFPMISDDLVNSYHLLLCALDLVYGNALQCSNRKELVNPNFKGLSEDFHAKDSKPSSDPPCIIEKLCSLHDGLVLEAKGIKEHFWKPYIRKLYEKKLLKGKEENLTGFLEPGNFGESFKAINKAYEEYVLSVGNLDERIFLGEDAEEEIGTLSRCLNAGSGTETAERVQMKNILQQHFDKSKALRISTPLTGVRYIKENSPCVTPVSTATHSLSRLHTMLTGLRNAPSEKLEQILRTCSRDPTQAIANRLKEMFEIYSQHFQPDEDFSNCAKEIASKHFRFAEMLYYKVLESVIEQEQKRLGDMDLSGILEQDAFHRSLLACCLEVVTFSYKPPGNFPFITEIFDVPLYHFYKVIEVFIRAEDGLCREVVKHLNQIEEQILDHLAWKPESPLWEKIRDNENRVPTCEEVMPPQNLERADEICIAGSPLTPRRVTEVRADTGGLGRRLTSPTTLYDRYSSPPASTTRRRLFVENDSPSDGGTPGRMPPQPLVNAVPVQNVSGETVSVTPVPGQTLVTMATATVTANNGQTVTIPVQGIANENGGITFFPVQVNVGGQAQAVTGSIQPLSAQALAGSLSSQQVTGTTLQVPGQVAIQQISPGGQQQKQGQSVTSSSNRPRKTSSLSLFFRKVYHLAAVRLRDLCAKLDISDELRKKIWTCFEFSIIQCPELMMDRHLDQLLMCAIYVMAKVTKEDKSFQNIMRCYRTQPQARSQVYRSVLIKGKRKRRNSGSSDSRSHQNSPTELNKDRTSRDSSPVMRSSSTLPVPQPSSAPPTPTRLTGANSDMEEEERGDLIQFYNNIYIKQIKTFAMKYSQANMDAPPLSPYPFVRTGSPRRIQLSQNHPVYISPHKNETMLSPREKIFYYFSNSPSKRLREINSMIRTGETPTKKRGILLEDGSESPAKRICPENHSALLRRLQDVANDRGSH

SEQ ID NO: 135 - protein, 2960 aa, Homo sapiens
MPGIKVGGSGVNVNAKGLDLGGRGGVQVPAVDISSSLGGRPVEVQGPSLESGDHAKIKFPTMKVPKFGVSTGREGQTPKAGLRVSAPEVSVGHKGGKPGLTIQAPQLEVSVPSANIEGLEGKLKGPQITGPSLEGDLGLKGAKPQGHIGVDASAPQIGGSITGPSVEVQAPDIDVQGPGSKLNVPKMKVPKFSVSGAKGEETGIDVTLPTGEVTVPGVSGDVSLPEIATGGLEGKMKGTKVKTPEMIIQKPKISMQDVDLSLGSPKLKGDIKVSAPGVQGDVKGPQVALKGSRVDIETPNLEGTLTGPRLGSPSGKTGTCRISMSEVDLNVAAPKVKGGVDVTLPRVEGKVKVPEVDVRGPKVDVSAPDVEAHGPEWNLKMPKMKMPTFSTPGAKGEGPDVHMTLPKGDISISGPKVNVEAPDVNLEGLGGKLKGPDVKLPDMSVKTPKISMPDVDLHVKGTKVKGEYDVTVPKLEGELKGPKVDIDAPDVDVHGPDWHLKMPKMKMPKFSVPGFKAEGPEVDVNLPKADVDISGPKIDVTAPDVSIEEPEGKLKGPKFKMPEMNIKVPKISMPDVDLHLKGPNVKGEYDVTMPKVESEIKVPDVELKSAKMDIDVPDVEVQGPDWHLKMPKMKMPKFSMPGFKAEGPEVDVNLPKADVDISGPKVGVEVPDVNIEGPEGKLKGPKFKMPEMNIKAPKISMPDVDLHMKGPKVKGEYDMTVPKLEGDLKGPKVDVSAPDVEMQGPDWNLKMPKIKMPKFSMPSLKGEGPEFDVNLSKANVDISAPKVDTNAPDLSLEGPEGKLKGPKFKMPEMHFRAPKMSLPDVDLDLKGPKMKGNVDISAPKIEGEMQVPDVDIRGPKVDIKAPDVEGQGLDWSLKIPKMKMPKFSMPSLKGEGPEVDVNLPKADVDVSGPKVDIEAPDVSLEGPEGKLKGPKFKMPEMHFKTPKISMPDVDLHLKGPKVKGDVDVSVPKVEGEMKVPDVEIKGPKMDIDAPDVEVQGPDWHLKMPKMKMPKFSMPGFKGEGREVDVNLPKADIDVSGPKVDVEVPDVSLEGPEGKLKGPKFKMPEMHFKAPKISMPDVDLNLKGPKLKGDVDVSLPEVEGEMKVPDVDIKGPKVDISAPDVDVHGPDWHLKMPKVKMPKFSMPGFKGEGPEVDVKLPKADVDVSGPKMDAEVPDVNIEGPDAKLKGPKFKMPEMSIKPQKISIPDVGLHLKGPKMKGDYDVTVPKVEGEIKAPDVDIKGPKVDINAPDVEVHGPDWHLKMPKVKMPKFSMPGFKGEGPEVDMNLPKADLGVSGPKVDIDVPDVNLEAPEGKLKGPKFKMPSMNIQTHKISMPDVGLNLKAPKLKTDVDVSLPKVEGDLKGPEIDVKAPKMDVNVGDIDIEGPEGKLKGPKFKMPEMHFKAPKISMPDVDLHLKGPKVKGDMDVSVPKVEGEMKVPDVDIKGPKVDIDAPDVEVHDPDWHLKMPKMKMPKFSMPGFKAEGPEVDVNLRKADIDVSGPSVDTDAPDLDIEGPEGKLKGSKFKMPKLNIKAPKVSMPDVDLNLKGPKLKGEIDASVPELEGDLRGPQVDVKGPLVEAEVPDVDLECPDAKLKGPKFKMPEMHFKAPKISMPDVDLHLKGPKVKGDADVSVPKLEGDLTGPSVGVEVPDVELECPDAKLKGPKFKMPDMHFKAPKISMPDVDLHTLPKVEGDLKGPEADIKGPKVDINTPDVDVHGPDWHLKMPKVKMPKFSMPGFKGEGPDVDVNLPKADIDVSGPKVDVDVPDVNIEGPDAKLKGPKFKMPEMSIKAPKISMPDIDLNLKGPKVKGDVDVTLPKVEGDLKGPEADIKGPKVDINTPDVDVHGPDWHLKMPKVKMPKFSMPGFKGEGPDVDVSLPKADIDVSGPKVDVDIPDVNIEGPDPKLKVPKVKMPEINIKAPKISIPDVDLDLKGPKVKGDFDVSVPKVEGTLKGPEVDLKGPRLDFEGPDAKLSGPSLKMPSLEISAPKVTAPDVDLHLKAPKIGFSGPKLEGGEVDLKGPKVEAPSLDVHMDSPDINIEGPDVKIPKFKKPKFGFGPKSPKADIKSPSLDVTVPEAELNLETPEISVGGKGKKSKFKMPKIHMSGPKIKAKKQGFDLNVPGGEIDASLKAPDVDVNIAGPDAALKVDVKSPKTKKTMFGKMYFPDVEFDIKSPKFKAEAPLPSPKLEGELQAPDLELSLPAIHVEGLDIKAKAPKVKMPDVDISVPKIEGDLKGPKVQANLGAPDINIEGLDAKVKTPSFGISAPQVSIPDVNVNLKGPKIKGDVPSVGLEGPDVDLQGPEAKIKFPKFSMPKIGIPGVKMEGGGAEVHAQLPSLEGDLRGPDVKLEGPDVSLKGPGVDLPSVNLSMPKVSGPDLDLNLKGPSLKGDLDASVPSMKVHAPGLNLSGVGGKMQVGGDGVKVPGIDATTKLNVGAPDVTLRGPSLQGDLAVSGDIKCPKVSVGAPDLSLEASEGSIKLPKMKLPQFGISTPGSDLHVNAKGPQVSGELKGPGVDVNLKGSRISAPNVDFNLEGPKVKGSLGATGEIKGPTVGGGLPGIGVQGLEGNLQMPGIKSSGCDVNLPGVNVKLPTGQISGPEIKGGLKGSEVGFHGAAPDISVKGPAFNMASPESDFGINLKGPKIKGGADVSGGVSAPDISLGEGHLSVKGSGGEWKGPQVSSALNLDTSKFAGGLHFSGPKVEGGVKGGQIGLQAPGLSVSGPQGHLESGSGKVTFPKMKIPKFTFSGRELVGREMGVDVHFPKAEASIQAGAGDGEWEESEVKLKKSKIKMPKFNFSKPKGKGGVTGSPEASISGSKGDLKSSKASLGSLEGEAEAEASSPKGKFSLFKSKKPRHRSNSFSDEREFSGPSTPTGTLEFEGGEVSLEGGKVKGKHGKLKFGTFGGLGSKSKGHYEVTGSDDETGKLQGSGVSLASKKSRLSSSSSNDSGNKVGIQLPEVELSVSTKKE

SEQ ID NO: 136 - protein, 533 aa, Homo sapiens
KGPKFKMPDLHLKAPKISMPEVDLNLKGPKMKGDVDVSLPKVEGDLKGPEVDVKGPKVDIDVPDVDVQGPDWHLKMPKVKMPKFSMPGFKGEGPDVDVNLPKADLDVSGPKVDIDVPDVNIEGPDAKLKGPKFKMPEMNIKAPKISMPDFDLHLKGPKVKGDVDVSLPKVEGDLKGPEVDIKGPKVDIDAPDVDVHGPDWHLKMPKVKMPKFSMPGFKGEGPDVDVTLPKADIEISGPKVDIDAPDVSIEGPDAKLKGPKFKMPEMNIKAPKISMPDIDFNLKGPKVKGDVDVSLPKVEGDLKGPEIDIKGPSLDIDTPDVNIEGPEGKLKGPKFKMPEMNIKAPKISMPDFDLHLKGPKVKGDVDVSLPKVESDLKGPEVDIEGPEGKLKGPKFKMPDVHFKSPQISMSDIDLNLKGPKIKGDMDISVPKLEGDLKGPKVDVKGPKVGIDTPDIDIHGPEGKLKGPKFKMPDLHLKAPKISMPEVDLNLKGPKVKGDMDISLPKVEGDLKGPEVDIRDPKVDIDVPDVDVQG

SEQ ID NO: 137 - protein, 161 aa, Homo sapiens
CYLTLTQAMKMGLGGNPYGPAGTGKTESVKALGGLLGRQVLVFNCDEGIDVKSMGRIFVGLVKCGAWGCFDEFNRLEESVLSAVSMQIQTIQDALKNHRTVCELLGKEVEVNSNSGIFITMNPAGKGYGGRQKLPDNLKQLFRPVAMSHPDNELIAEVILY

SEQ ID NO: 138 - protein, 142 aa, Homo sapiens [sequence omitted]

SEQ ID NO: 139 - protein, 68 aa, Homo sapiens [sequence omitted]

SEQ ID NO: 140 - protein, 603 aa, Homo sapiens
  VARIANT 22, 40, 54, 99, 100, 101, 110, 135, 146, 162, 168, 200, 201,202, 233, 277, 301, 302, 303, 363, 364, 379, 402, 403, 404,407, 472, 497, 503, 504, 505, 547, 559, 583: Xaa = Any Amino Acid
GRARWLTPVIPALWEAEAGGSXGQEIETILANKVKPRLYXKYKKLAGRGGGRLXSQLLGRLRQENGVNPGSGACSEPRLRHCSPQSGLGDRARLRLKKXXXAGRGGSRLXSQHFGRPRRVDHEVRRSRPSWLTRXNPVSTKNTKNXPGAVAGACSPSYWGGXGRRMAXTREAELAVSRDCATAVRSPAWATERDSVSKKXXXPGAVAHACNPSTLGGRGGWIMRSGDRDHPGXQGETPSLLKIQKISRARWRAPVVPATGEAEAGEWREPGKRSLQXAEIAPLQSAVRPGRQSETPSQKKXXXFFLRRSLALSPRPDCGLQWRNLGSLQAPLPGFTPFSCLSLPSSWDYRRPPPRPANFLYFXXRRGFTLLARMVSISXPHDPPASASQSAGITGVSHRARXXXFFXDGVSLCRPGRTADCSGAISAHCKLRFPGSRHSPASASPVAGTTGARHRARLIFCIFSRDGVSPCXPGWSRSPDLMIHPPRPPKVLGLQAXATAPGXXXFFETESRSVAQAGLRTAVAQSRLTASSASRVHAILLPQPPQXLGLQAPATAPGXFFVFLVETGFHLVSQDGLDLLTSXSTRLGLPKCWDYRREPPRPA

SEQ ID NO: 141 - protein, 971 aa, Homo sapiens
MAGRVPSLLVLLVFPSSCLAFRSPLSVFKRFKETTRPFSNECLGTTRPVVPIDSSDFALDIRMPGVTPKQSDTYFCMSMRIPVDEEAFVIDFKPRASMDTVHHMLLFGCNMPSSTGSYWFCDEGTCTDKANILYAWARNAPPTRLPKGVGFRVGGETGSKYFVLQVHYGDISAFRDNNKDCSGVSLHLTRLPQPLIAGMYLMMSVDTVIPAGEKVVNSDISCHYKNYPMHVFAYRVHTHHLGKVVSGYRVRNGQWTLIGRQSPQLPQAFYPVGHPVDVSFGDLLAARCVFTGEGRTEATHIGGTSSDEMCNLYIMYYMEAKHAVSFMTCTQNVAPDMFRTIPPEANIPIPVKSDMVMMHEHHKETEYKDKIPLLQQPKREEEEVLDQGDFYSLLSKLLGEREDVVHVHKYNPTEKAESESDLVAEIANVVQKKDLGRSDAREGAEHERGNAILVRDRIHKFHRLVSTLRPPESRVFSLQQPPPGEGTWEPEHTGDFHMEEALDWPGVYLLPGQVSGVALDPKNNLVIFHRGDHVWDGNSFDSKFVYQQIGLGPIEEDTILVIDPNNAAVLQSSGKNLFYLPHGLSIDKDGNYWVTDVALHQVFKLDPNNKEGPVLILGRSMQPGSDQNHFCQPTDVAVDPGTGAIYVSDGYCNSRIVQFSPSGKFITQWGEESSGSSPLPGQFTVPHSLALVPLLGQLCVADRENGRIQCFKTDTKEFVREIKHSSFGRNVFAISYIPGLLFAVNGKPHFGDQEPVQGFVMNFSNGEIIDIFKPVRKHFDMPHDIVASEDGTVYIGDAHTNTVWKFTLTEKLEHRSVKKAGIEVQEIKEAVVETKMENKPTSSELQKMQEKQKLIKEPGSGVPVVLITTLLVIPVVVLLAIAIFIRWKKSRAFGDSEHKLETSSGRVLGRFRGKGSGGLNLGNFFASRKGYSRKGFDRLSTEGSDQEKEDDGSESEEEYSAPLPALAPSSS

SEQ ID NO: 142 - protein, 41 aa, Homo sapiens
IDGFRDVAVAFTQKEWKLLSSAQRTLYREVMLENYSHLVSL

SEQ ID NO: 143 - protein, 404 aa, Homo sapiens
  VARIANT 184: Xaa = Any Amino Acid
MQREEIRTVKRGGGASGRVPGLRSGDGRPRRVSRTGIAEDVDPLPGLPRRARPSVSGYAARPGALAVSGPAGQPPGQGPQRPRRPAKDAQPAPPPRPAGATRTGAPPAEGRRHKAAPHNGPARRSPPCNPAPRSCTHIWATRACGPRAPRSSALGSASVPTASSRLRDGPPPGAEIPTLAGERXATPGTKEERGACAGARPGVSLRCQGKRAWAKFRTLACAGLDVCCEGSEAGDAGTAGSSARKALGCSGAVTAALSPPGPAARLLSGLAGMPRAPPAFKESGLAADAYVSLGAGRIPWVPAPFHVGRRVGEPGSSLRAPPAAGDGGAPAPAALPRAWSAPSPAEGSWLLLSPRPVVPSGRLAQLPRLIPAPHLNCAGREESRDAVLPSVDRGPRSRIPWEAA

SEQ ID NO: 144 - protein, 76 aa, Homo sapiens
  VARIANT 1, 9: Xaa = Any Amino Acid
XAVYGGSLXSNYYWSWIRQPPGKGLEWIGETNYRGSVKYNPSLESRVTISVDSSKNQFFLKMSSVTAADTAIYYCA

SEQ ID NO: 145 - protein, 126 aa, Homo sapiens
EAESLTSAQKAKAEEKKRRKMSKGLPDKSEEEKSTMAKKLEQKPKGEGIPTTAKLKIDEFESNVNEVKDPYPSADFPGDDEEDEPEIPLSPRPRPLAELQLKEKAVPIPEASSFFIFSPTNKIRVL

SEQ ID NO: 146 - protein, 176 aa, Homo sapiens
  VARIANT 11: Xaa = Any Amino Acid
MVEADCHGKLXIGGLNREANEKVLKEVFAKHVLLIKGRTSKSRDFVVIIFENAADAKNAARDMNGKSLDGKEIKVEQAKKPSFPSGGRRRPPPSSRNRSPSGSLRSARGSSGGTRPWLPSHEGHLDDGGYALDLNTSSSRGAIPIKRGPSSRSGGPPPKTSAPSAMARSNSWMGGQ

SEQ ID NO: 147 - protein, 284 aa, Homo sapiens
LKGTVPDDAVEALADSLGKKEADPEDGKPVMDKVKEKAKEEDREKLGEKEETIPPDYRLEEVKDKDGKPLLPKESKEQLPPMSEDFLLDALSEDFSGPQNASSLKFEDAKLAAAISEVVSQTPASTTQAGAPPRDTSQSDKDLDDALDKLSDSLGQRQPDPDENKPMEDKVKEKAKAEHRDKLGERDDTIPPEYRHLLDDNGQDKPVKPPTKKSEDSKKPADDQDPIDALSGDLDSCPSTTETSQNTAKDKCKKAASSSKAPKNGGKAKDSAKTTEETSKPKDD

SEQ ID NO: 148 - protein, 180 aa, Homo sapiens
GNIFANLFKGLFGKKEMRILMVGLDAAGKTTILYKLKLGEIVTTIPTIGFNVETVEYKNISFTVWDVGGQDKIRPLWRHYFQNTQGLIFVVDSNDRERVNEAREELMRMLAEDELRDAVLLVFANKQDLPNAMNAAEITDKLGLHSLRHRNWYIQATCATSGDGLYEGLDWLSNQLRNQK

SEQ ID NO: 149 - protein, 1382 aa, Homo sapiens [sequence omitted]

SEQ ID NO: 150 - protein, 453 aa, Homo sapiens [sequence omitted]

SEQ ID NO: 151 - protein, 280 aa, Homo sapiens
SANGRDALDGPAAEAEPEHSFDGLRRKVSAQRLQEAGILSAEELQRLAQGHTTVDELARREDVRHYLQGRSSIAGLLLKATNEKLSVYAALQRQLLSPGTALILLEAQAASGFLLDPVRNRRLTVNEAVKEGVVGPELHHKLLSAERAVTGYKDPYTVQQISLFQAMQKGLIVREHGIRLLEAQIATGGVIDPVHSHRVPVDVAYRRGYFDEEMNRVLADPSDDTKGFFDPNTHENLTYLQLLERCVEDPETGLFLLPLTDKAAKGGELVYTDSEARDVP

SEQ ID NO: 152 - protein, 462 aa, Homo sapiens
GSSARARFLLRFCRARLSGTGLAMDPLSELQDDLTLDDTSEALNQLKLASIDEKNWPSDEMPDFPKSDDSKSSSPELVTHLKWDDPYYDIARHQIVEVAGDDKYGRKIIVFSACRMPPSHQLDHSKLLGYLKHTLDQYVESDYTLLYLHHGLTSDNKPSLSWLRDAYREFDRKYKKNIKALYIVHPTMFIKTLLILFKPLISFKFGQKIFYVNYLSELSEHVKLEQLGIPRQVLKYDDFLKSTQKSPATAPKPMPPRPPLPNQQFGVSLQHLQEKNPEQEPIPIVLRETVAYLQAHALTTEGIFRRSANTQVVREVQQKYNMGLPVDFDQYNELHLPAVILKTFLRELPEPLLTFDLYPHVVGFLNIDESQRVPATLQVLQTLPEENYQVLRFLTAFLVQISAHSDQNKMTNTNLAVVFGPNLLWAKDAAITLKAINPINTFTKFLLDHQGELFPSPDPSGL

SEQ ID NO: 153 - protein, 135 aa, Homo sapiens [sequence omitted]

SEQ ID NO: 154 - protein, 1581 aa, Homo sapiens
KNCAVCNCGGGPCDSVTGECLEEGFEPPTGCDKCVWDLTDDLRLAALSIEEGKSGVLSVSSGAAAHRHVNEINATIYLLKTKLSERENQYALRKIQINNAENTMKSLLSDVEELVEKENQASRKGQLVQKESMDTINHASQLVEQAHDMRDKIQEINNKMLYYGEEHELSPKEISEKLVLAQKMLEEIRSRQPFFTQRELVDEEADEAYELLSQAESWQRLHNETRTLFPVVLEQLDDYNAKLSDLQEALDQALNHVRDAEDMNRATAARQRDHEKQQERVREQMEVVNMSLSTSADSLTTPRLTLSELDDIIKNASGIYAEIDGAKSELQVKLSNLSNLSHDLVQEAIDHAQDLQQEANELSRKLHSSDMNGLVQKALDASNVYENIVNYVSEANETAEFALNTTDRIYDAVSGIDTQIIYHKDESENLLNQARELQAKAESSSDEAVADTSRRVGGALARKSALKTRLSDAVKQLQAAERGDAQQRLGQSRLITEEANRTTMEVQQATAPMANNLTNWSQNLQHFDSSAYNTAVNSARDAVRNLTEVVPQLLDQLRTVEQKRPASNVSASIQRIRELIAQTRSVASKIQVSMMFDGQSAVEVHSRTSMDDLKAFTSLSLYMKPPVKRPELTETADQFILYLGSKNAKKEYMGLAIKNDNLVYVYNLGTKDVEIPLDSKPVSSWPAYFSIVKIERVGKHGKVFLTVPSLSSTAEEKFIKKGEFSGDDSLLDLDPEDTVFYVGGVPSNFKLPTSLNLPGFVGCLELATLNNDVISLYNFKHIYNMDPSTSVPCARDKLAFTQSRAASYFFDGSGYAVVRDITRRGKFGQVTRFDIEVRTPADNGLILLMVNGSMFFRLEMRNGYLHVFYDFGFSSGRVHLEDTLKKAQINDAKYHEISIIYHNDKKMILVVDRRHVKSMDNEKMKIPFTDIYIGGAPPEILQSRALRAHLPLDINFRGCMKGFQFQKKDFNLLEQTETLGVGYGCPEDSLISRRAYFNGQSFIASIQKISFFDGFEGGFNFRTLQPNGLLFYYASGSDVFSISLDNGTVIMDVKGIKVQSVDKQYNDGLSHFVISSVSPTRYELIVDKSRVGSKNPTKGKIEQTQASEKKFYFGGSPISAQYANFTGCISNAYFTRVDRDVEVEDFQRYTEKVHTSLYECPIESSPLFLLHKKGKNLSKPKASQNKKGGKSKDAPSWDPVALKLPERNTPRNSHCHLSNSPRAIEHAYQYGGTANSRQEFEHLKGDFGAKSQFSIRLRTRSSHGMIFYVSDQEENDFMTLFLAHGRLVYMFNVGHKKLKIRSQEKYNDGLWHDVIFIRERSSGRLVIDGLRVLEESLPPTEATWKIKGPIYLGGVAPGKAVKNVQINSIYSFSGCLSNLQLNGASITSASQTFSVTPCFEGPMETGTYFSTEGGYVVLDESFNIGLKFEIAFEVRPRSSSGTLVHGHSVNGEYLNVHMKNGQVIVKVNNGIRDFSTSVTPKQSLCDGRWHRITVIRDSNVVQLDVDSEVNHVVGPLNPKPIDHREPVFVGGVPESLLTPRLAPSKPFTGCIRHFVIDGHPVSFSKAALVSGAVSINSCPAA

SEQ ID NO: 155 - protein, 1234 aa, Homo sapiens [sequence omitted]

SEQ ID NO: 156 - protein, 539 aa, Homo sapiens [sequence omitted]

SEQ ID NO: 157 - protein, 539 aa, Homo sapiens [sequence omitted]

SEQ ID NO: 158 - protein, 1017 aa, Homo sapiens
VEKGEFALRLSSTQEEVHQLRRGIEKLRVRIEADEKKQLHIAEKLKERDGENDSLKDKVENLERELQMSEENQELVILDAENSKAEVETLKTQIEEMARSLKVFELDLVTLRSEKENLTKQIQEKQGQLSELDKLLSSFKSQLEEKEQAEIQIKEESKTAVEMLQNQLKELNEAVAALCGDQEIMKATEQSLDPPIEEEHQLRNSIEKLRARLEADEKKQLCVLQQLKESEHHADLLKGRVENLERELEIARTNQEHAALEAENSKGEVETLKAKIEGMTQSLRGLELDVVTIRSEKEDLTNELQKEQERISELEIINSSFENILQEKEQEKVQMKEKSSTAMEMLQTQLKSSMREWQPCIMTKKPVSAKEQNLSSQVECLELEKAQLLQGLDEAKNNYIVLQSSVNGLIQEVEDGKQKLEKKDEEISRLKNQIQDQEQLVSKLSQVEGEHQLWKEQNLELRNLTVELEQKIQVLQSKNASLQDTLEVLQSSYKNLENELELTKMDKMSFVEKVNKMTAKETELQREMHEMAQKTAELQEELSGEKNRLAGELQLLLEEIKSSKDQLKELTLENSELKKSLDCMHKDQVEKEGKVREEIAEYQLRLHEAEKKHQALLLDTNKQYEVEIQTYREKLTSKEECLSSQKLEIDLLKSSKEELNNSLKATTQILEELKKTKMDNLKYVNQLKKENERAQGKMKLLIKSCKQLEEEKEILQKELSQLQAAQEKQKTGTVMDTKVDELTTEIKELKETLEEKTKEADEYLDKYCSLLISHEKLEKAKEMLETQVAHLCSQQSKQDSRGSPLLGPVVPGPSPIPSVTEKRLSSGQNKASGKRQRSSGIWENGGGPTPATPESFSKKSKKAVMSGIHPAEDTEGTEFEPEGLPEVVKKGFADIPTGKTSPYILRRTTMATRTSPRLAAQKLALSPLSLGKENLAESSKPTAGGSRSQKVKVAQRSPVDSGTILREPTTKSVPVNNLPERSPTDSPREGLRVKRGRLVPSPKAGLESKGSENCKVQ

SEQ ID NO: 159 - protein, 505 aa, Homo sapiens [sequence omitted]

SEQ ID NO: 160 - protein, 124 aa, Homo sapiens
MSARGPAIGIDLGTTYSCVGVFQHGKVEIIANDQGNRTTPSYVAFTDTERLIGAAKNQVAMNPTNTIFDAKRLIGRKFEDATVQSDMKHWPFRVVSEGGKPKVQVEYKGETKTFFPEEISSMVL

SEQ ID NO: 161 - protein, 230 aa, Homo sapiens [sequence omitted]

SEQ ID NO: 162 - protein, 279 aa, Homo sapiens [sequence omitted]

SEQ ID NO: 163 - protein, 458 aa, Homo sapiens
TEQKVSDFYDIEERLGSGKFGQVFRLVEKKTRKVWAGKFFKAYSAKEKENIRQEISIMNCLHHPKLVQCVDAFEEKANIVMVLEIVSGGELFERIIDEDFELTERECIKYMRQISEGVEYIHKQGIVHLDLKPENIMCVNKTGTRIKLIDFGLARRLENAGSLKVLFGTPEFVAPEVINYEPIGYATDMWSIGVICYILVSGLSPFMGDNDNETLANVTSATWDFDDEAFDEISDDAKDFISNLLKKDMKNRLDCTQCLQHPWLMKDTKNMEAKKLSKDRMKKYMARRKWQKTGNAVRAIGRLSSMAMISGLSGRKSSTGSPTSPLNAEKLESEDVSQAFLEAVAEEKPHVKPYFSKTIRDLEVVEGSAARFDCKIEGYPDPEVVWFKDDQSIRESRHFQIDYDEDGNCSLIISDVCGDDDAKYTCKAVNSLGEATCTAELIVETMEEGEGEGEEEEE

SEQ ID NO: 164 - protein, 193 aa, Homo sapiens
QFRDVAIEFSLEEWHCLDTAQRNLYRNVMLENYSNLVFLGIVVSKPDLIAHLEQGKKPLTMKRHEMVANPSGPVICSHFAQDLWPEHNIKDSFQKVILRRYEKRGHGNLQLIKRCERVDECKVHTGGYNGLNQSSTTTQSKVFQCDKYGKDFHKFSNSNRHNIRHTEKKPFKCIECGKAFNQFSTLITHKKIH

SEQ ID NO: 165 - protein, 567 aa, Homo sapiens
TRVNSEQEHFLIVPFGLLYSEVTASSLVKINLQGDIVDRGSTNLGVNQAGFTLHSAIYAARPDVKCVVHIHTPAGAAVSAMKCGLLPISPEALSLGEVAYHDYHGILVDEEEKVLIQKNLGPKSKVLILRNHGLVSVGESVEEAFYYIHNLVVACEIQVRTLASAGGPDNLVLLNPEKYKAKSRSPGSPVGEGTGSPPKWQIGEQEFEALMRMLDNLGYRTGYPYRYPALREKSKKYSDVEVPASVTGYSFASDGDSGTCSPLRHSFQKQQREKTRWLNSGRGDEASEEGQNGSSPKSKTKWTKEDGHRTSTSAVPNLFVPLNTNPKEVQEMRNKIREQNLQDIKTAGPQSQVLCGVVMDRSLVQGELVTASKAIIEKEYQPHVIVSTTGPNPFTTLTDRELEEYRREVERKQKGSEENLDEAREQKEKSPPDQPAVPHPPPSTPIKLEEDLVPEPTTGDDSDAATFKPTLPDLSPDEPSEALGFPMLEKEEEAHRPPSPTEAPTEASPEPAPDPAPVAEEAAPSAVEEGAAADPGSDGSPGKSPSKKKKKFRTPSFLKKSKKKSDS

SEQ ID NO: 166 - protein, 1225 aa, Homo sapiens
IENFKSYKGRQIIGPFQRFTAIIGPNGSGKSNLMDAISFVLGEKTSNLRVKTLRDLIHGAPVGKPAANRAFVSMVYSEEGAEDRTFARVIVGGSSEYKINNKVVQLHEYSEELEKLGILIKARNFLVFQGAVESIAMKNPKERTALFEEISRSGELAQEYDKRKKEMVKAEEDTQFNYHRKKNIAAERKEAKQEKEEADRYQRLKDEVVRAQVQLQLFKLYHNEVEIEKLNKELASKNKEIEKDKKRMDKVEDELKEKKKELGKMMREQQQIEKEIKEKDSELNQKRPQYIKAKENTSHKIKKLEAAKKSLQNAQKHYKKRKGDMDELEKEMLSVEKARQEFEERMEEESQSQGRDLTLEENQVKKYHRLKEEASKRAATLAQELEKFNRDQKADQDRLDLEERKKVETEAKIKQKLREIEENQKRIEKLEEYITTSKQSLEEQKKLEGELTEEVEMAKRRIDEINKELNQVMEQLGDARIDRQESSRQQRKAEIMESIKRLYPGSVYGRLIDLCQPTQKKYQIAVTKVLGKNMDAIIVDSEKTGRDCIQYIKEQRGEPETFLPLDYLEVKPTDEKLRELKGAKLVIDVIRYEPPHIKKALQYACGNALVCDNVEDARRIAFGGHQRHKTVALDGTLFQKSGVISGGASDLKAKARRWDEKAVDKLKEKKERLTEELKEQMKAKRKEAELRQVQSQAHGLQMRLKYSQSDLEQTKTRHLALNLQEKSKLESELANFGPRINDIKRIIQSREREMKDLKEKMNQVEDEVFEEFCREIGVRNIREFEEEKVKRQNEIAKKRLEFENQKTRLGIQLDFEKNQLKEDQDKVHMWEQTVKKDENEIEKLKKEEQRHMKIIDETMAQLQDLKNQHLAKKSEVNDKNHEMEEIRKKLGGANKEMTHLQKEVTAIETKLEQKRSDRHNLLQACKMQDIKLPLSKGTMDDISQEEGSSQGEDSVSGSQRISSIYAREALIEIDYGDLCEDLKDAQAEEEIKQEMNTLQQKLNEQQSVLQRIAAPNMKAMEKLESVRDKFQETSDEFEAARKRAKKAKQAFEQIKKERFDRFNACFESVATNIDEIYKALSRNSSAQAFLGPENPEEPYLDGINYNCVAPGKRFRPMDNLSGGEKTVAALALLFAIHSYKPAPFFVLDEIDAALDNTNIGKVANYIKEQSTCNFQAIVISLKEEFYTKAESLIGVYPEQGDCVISKVLTFDLTKYPDANPNPNEQ

SEQ ID NO: 167 - protein, 539 aa, Homo sapiens [sequence omitted]

SEQ ID NO: 168 - protein, 564 aa, Homo sapiens
RTSNMVGLSYPPAVIEALKDVDKWSFDVFSLNEASGDHALKFIFYELLTRYDLISRFKIPISALVSFVEALEVGYSKHKNPYHNLMHAADVTQTVHYLLYKTGVANWLTELEIFAIIFSAAIHDYEHTGTTNNFHIQTRSDPAILYNDRSVLENHHLSAAYRLLQDDEEMNILINLSKDDWREFRTLVIEMVMATDMSCHFQQIKAMKTALQQPEAIEKPKALSLMLHTADISHPAKAWDLHHRWTMSLLEEFFRQGDREAELGLPFSPLCDRKSTMVAQSQVGFIDFIVEPTFTVLTDMTEKIVSPLIDETSQTGGTGQRRSSLNSISSSDAKRSGVKTSGSEGSAPINNSVISVDYKSFKATWTEVVHINRERWRAKVPKEEKAKKEAEEKARLAAEEQQKEMEAKSQAEEGASGKAEKKTSGETKNQVNGTRANKSDNPRGKNSKAEKSSGEQQQNGDFKDGKNKTDKKDHSNIGNDSKKTDGTKQRSHGSPAPSTSSTCRLTLPVIKPPLRHFKRPAYASSSYAPSVSKKTDEHPARYKMLDQRIKMKKIQNISHNWNRK

SEQ ID NO: 169 - protein, 279 aa, Homo sapiens
MTERFDCHHCNESLFGKKYILREESPYCVVCFETLFANTCEECGKPIGCDCKDLSYKDRHWHEACFHCSQCRNSLVDKPFAAKEDQLLCTDCYSNEYSSKCQECKKTIMPGTRKMEYKGSSWHETCFICHRCQQPIGTKSFIPKDNQNFCVPCYEKQHAMQCVQCKKPITTGGVTYREQPWHKECFVCTACRKQLSGQRFTARDDFAYCLNCFCDLYAKKCAGCTNPISGLGGTKYISFEERQWHNDCFNCKKCSLSLVGRGFLTERDDILCPDCGKDI

SEQ ID NO: 170 - protein, 291 aa, Homo sapiens
MAVQVVQAVQAVHLESDAFLVCLNHALSTEKEEVMGLCIGELNDDTRSDSKFAYTGTEMRTVAEKVDAVRIVHIHSVIILRRSDKRKDRVEISPEQLSAASTEAERLAELTGRPMRVVGWYHSHPHITVWPSHVDVRTQAMYQMMDQGFVGLIFSCFIEDKNTKTGRVLYTCFQSIQAQKSSEYERIEIPIHIVPHVTIGKVCLESAVELPKILCQEEQDAYRRIHSLTHLDSVTKIHNGSVFTKNLCSQMSAVSGPLLQWLEDRLEQNQQHLQELQQEKEELMQELSSLE

SEQ ID NO: 171 - protein, 1078 aa, Homo sapiens
MAFYSCCWVLLALTWHTSAYGPDQRAQKKGDIILGGLFPIHFGVAAKDQDLKSRPESVECIRYNFRGFRWLQAMIFAIEEINSSPALLPNLTLGYRIFDTCNTVSKALEATLSFVAQNKIDSLNLDEFCNCSEHIPSTIAVVGATGSGVSTAVANLLGLFYIPQVSYASSSRLLSNKNQFKSFLRTIPNDEHQATAMADIIEYFRWNWVGTIAADDDYGRPGIEKFREEAEERDICIDFSELISQYSDEEEIQHVVEVIQNSTAKVIVVFSSGPDLEPLIKEIVRRNITGKIWLASEAWASSSLIAMPQYFHVVGGTIGFALKAGQIPGFREFLKKVHPRKSVHNGFAKEFWEETFNCHLQEGAKGPLPVDTFLRGHEESGDRFSNSSTAFRPLCTGDENISSVETPYIDYTHLRISYNVYLAVYSIAHALQDIYTCLPGRGLFTNGSCADIKKVEAWQVLKHLRHLNFTNNMGEQVTFDECGDLVGNYSIINWHLSPEDGSIVFKEVGYYNVYAKKGERLFINEEKILWSGFSREVPFSNCSRDCLAGTRKGIIEGEPTCCFECVECPDGEYSDETDASACNKCPDDFWSNENHTSCIAKEIEFLSWTEPFGIALTLFAVLGIFLTAFVLGVFIKFRNTPIVKATNRELSYLLLFSLLCCFSSSLFFIGEPQDWTCRLRQPAFGISFVLCISCILVKTNRVLLVFEAKIPTSFHRKWWGLNLQFLLVFLCTFMQIVICVIWLYTAPPSSYRNQELEDEIIFITCHEGSLMALGFLIGYTCLLAAICFFFAFKSRKLPENFNEAKFITFSMLIFFIVWISFIPAYASTYGKFVSAVEVIAILAASFGLLACIFFNKIYIILFKPSRNTIEEVRCSTAAHAFKVAARATLRRSNVSRKRSSSLGGSTGSTPSSSISSKSNSEDPFPQPERQKQQQPLALTQQEQQQQPLTLPQQQRSQQQPRCKQKVIFGSGTVTFSLSFDEPQKNAMAHRNSTHQNSLEAQKSSDTLTRHQPLLPLQCGETDLDLTVQETGLQGPVGGDQRPEVEDPEELSPALVVSSSQSFVISGGGSTVTENVVNS

SEQ ID NO: 172 - protein, 277 aa, Homo sapiens
MENTENSVDSKSIKNLEPKIIHGSESMDSGISLDNSYKMDYPEMGLCIIINNKNFHKSTGMTSRSGTDVDAANLRETFRNLKYEVRNKNDLTREEIVELMRDVSKEDHSKRSSFVCVLLSHGEEGIIFGTNGPVDLKKITNFFRGDRCRSLTGKPKLFIIQACRGTELDCGIETDSGVDDDMACHKIPVDADFLYAYSTAPGYYSWRNSKDGSWFIQSLCAMLKQYADKLEFMHILTRVNRKVATEFESFSFDATFHAKKQIPCIVSMLTKELYFYH

SEQ ID NO: 173 - protein, 302 aa, Homo sapiens
MALVASVRVPARVLLRAGARLPGAALGRTERAAGGGDGARRFGSQRVLVEPDAGAGVAVMKFKNPPVNSLSLEFLTELVISLEKLENDKSFRGVILTSDRPGVFSAGLDLTEMCGRSPAHYAGYWKAVQELWLRLYQSNLVLVSAINGACPAGGCLVALTCDYRILADNPRYCIGLNETQLGIIAPFWLKDTLENTIGHRAAERALQLGLLFPPAEALQVGIVDQVVPEEQVQSTALSAIAQWMAIPDHARQLTKAMMRKATASRLVTQRDADVQNFVSFISKDSIQKSLQMYLERLKEEKG

SEQ ID NO: 174 - protein, 3256 aa, Homo sapiens
MWPTRRLVTIKRSGVDGPHFPLSLSTCLFGRGIECDIRIQLPVVSKQHCKIEIHEQEAILHNFSSTNPTQVNGSVIDEPVRLKHGDVITIIDRSFRYENESLQNGRKSTEFPRKIREQEPARRVSRSSFSSDPDEKAQDSKAYSKITEGKVSGNPQVHIKNVKEDSTADDSKDSVAQGTTNVHSSEHAGRNGRNAADPISGDFKEISSVKLVSRYGELKSVPTTQCLDNSKKNESPFWKLYESVKKELDVKSQKENVLQYCRKSGLQTDYATEKESADGLQGETQLLVSRKSRPKSGGSGHAVAEPASPEQELDQNKGKGRDVESVQTPSKAVGASFPLYEPAKMKTPVQYSQQQNSPQKHKNKDLYTTGRRESVNLGKSEGFKAGDKTLTPRKLSTRNRTPAKVEDAADSATKPENLSSKTRGSIPTDVEVLPTETEIHNEPFLTLWLTQVERKIQKDSLSKPEKLGTTAGQMCSGLPGLSSVDINNFGDSINESEGIPLKRRRVSFGGHLRPELFDENLPPNTPLKRGEAPTKRKSLVMHTPPVLKKIIKEQPQPSGKQESGSEIHVEVKAQSLVISPPAPSPRKTPVASDQRRRSCKTAPASSSKSQTEVPKRGGERVATCLQKRVSISRSQHDILQMICSKRRSGASEANLIVAKSWADVVKLGAKQTQTKVIKHGPQRSMNKRQRRPATPKKPVGEVHSQFSTGHANSPCTIIIGKAHTEKVHVPARPYRVLNNFISNQKMDFKEDLSGIAEMFKTPVKEQPQLTSTCHIAISNSENLLGKQFQGTDSGEEPLLPTSESFGGNVFFSAQNAAKQPSDKCSASPPLRRQCIRENGNVAKTPRNTYKMTSLETKTSDTETEPSKTVSTVNRSGRSTEFRNIQKLPVESKSEETNTEIVECILKRGQKATLLQQRREGEMKEIERPFETYKENIELKENDEKMKAMKRSRTWGQKCAPMSDLTDLKSLPDTELMKDTARGQNLLQTQDHAKAPKSEKGKITKMPCQSLQPEPINTPTHTKQQLKASLGKVGVKEELLAVGKFTRTSGETTHTHREPAGDGKSIRTFKESPKQILDPAARVTGMKKWPRTPKEEAQSLEDLAGFKELFQTPGPSEESMTDEKTTKIACKSPPPESVDTPTSTKQWPKRSLRKADVEEEFLALRKLTPSAGKAMLTPKPAGGDEKDIKAFMGTPVQKLDLAGTLPGSKRQLQTPKEKAQALEDLAGFKELFQTPGHTEELVAAGKTTKIPCDSPQSDPVDTPTSTKQRPKRSIRKADVEGELLACRNLMPSAGKAMHTPKPSVGEEKDIIIFVGTPVQKLDLTENLTGSKRRPQTPKEEAQALEDLTGFKELFQTPGHTEEAVAAGKTTKMPCESSPPESADTPTSTRRQPKTPLEKRDVQKELSALKKLTQTSGETTHTDKVPGGEDKSINAFRETAKQKLDPAASVTGSKRHPKTKEKAQPLEDLAGWKELFQTPVCTDKPTTHEKTTKIACRSQPDPVDTPTSSKPQSKRSLRKVDVEEEFFALRKRTPSAGKAMHTPKPAVSGEKNIYAFMGTPVQKLDLTENLTGSKRRLQTPKEKAQALEDLAGFKELFQTRGHTEESMTNDKTAKVACKSSQPDLDKNPASSKRRLKTSLGKVGVKEELLAVGKLTQTSGETTHTHTEPTGDGKSMKAFMESPKQILDSAASLTGSKRQLRTPKGKSEVPEDLAGFIELFQTPSHTKESMTNEKTTKVSYRASQPDLVDTPTSSKPQPKRSLRKADTEEEFLAFRKQTPSAGKAMHTPKPAVGEEKDINTFLGTPVQKLDQPGNLPGSNRRLQTRKEKAQALEELTGFRELFQTPCTDNPTADEKTTKKILCKSPQSDPADTPTNTKQRPKRSLKKADVEEEFLAFRKLTPSAGKAMHTPKAAVGEEKDINTFVGTPVEKLDLLGNLPGSKRRPQTPKEKAKALEDLAGFKELFQTPGHTEESMTDDKITEVSCKSPQPDPVKTPTSSKQRLKISLGKVGVKEEVLPVGKLTQTSGKTTQTHRETAGDGKSIKAFKESAKQMLDPANYGTGMERWPRTPKEEAQSLEDLAGFKELFQTPDHTEESTTDDKTTKIACKSPPPESMDTPTSTRRRPKTPLGKRDIVEELSALKQLTQTTHTDKVPGDEDKGINVFRETAKQKLDPAASVTGSKRQPRTPKGKAQPLEDLAGLKELFQTPVCTDKPTTHEKTTKIACRSPQPDPVGTPTIFKPQSKRSLRKADVEEESLALRKRTPSVGKAMDTPKPAGGDEKDMKAFMGTPVQKLDLPGNLPGSKRWPQTPKEKAQALEDLAGFKELFQTPGTDKPTTDEKTTKIACKSPQPDPVDTPASTKQRPKRNLRKADVEEEFLALRKRTPSAGKAMDTPKPAVSDEKNINTFVETPVQKLDLLGNLPGSKRQPQTPKEKAEALEDLVGFKELFQTPGHTEESMTDDKITEVSCKSPQPESFKTSRSSKQRLKIPLVKVDMKEEPLAVSKLTRTSGETTQTHTEPTGDSKSIKAFKESPKQILDPAASVTGSRRQLRTRKEKARALEDLVDFKELFSAPGHTEESMTIDKNTKIPCKSPPPELTDTATSTKRCPKTRPRKEVKEELSAVERLTQTSGQSTHTHKEPASGDEGIKVLKQRAKKKPNPVEEEPSRRRPRAPKEKAQPLEDLAGFTELSETSGHTQESLTAGKATKIPCESPPLEVVDTTASTKRHLRTRVQKVQVKEEPSAVKFTQTSGETTDADKEPAGEDKGIKALKESAKQTPAPAASVTGSRRRPRAPRESAQAIEDLAGFKDPAAGHTEESMTDDKTTKIPCKSSPELEDTATSSKRRPRTRAQKVEVKEELLAVGKLTQTSGETTHTDKEPVGEGKGTKAFKQPAKRNVDAEDVIGSRRQPRAPKEKAQPLEDLASFQELSQTPGHTEELANGAADSFTSAPKQTPDSGKPLKISRRVLRAPKVEPVGDVVSTRDPVKSQSKSNTSLPPLPFKRGGGKDGSVTGTKRLRCMPAPEEIVEELPASKKQRVAPRARGKSSEPVVIMKRSLRTSAKRIEPAEELNSNDMKTNKEEHKLQDSVPENKGISLRSRRQDKTEAEQQITEVFVLAERIEINRNEKKPMKTSPEMDIQNPDDGARKPIPRDKVTENKRCLRSARQNESSQPKVAEESGGQKSAKVLMQNQKGKGEAGNSDSMCLRSRKTKSQPAASTLESKSVQRVTRSVKRCAENPKKAEDNVCVKKITTRSHRDSEDI

SEQ ID NO: 175 - protein, 347 aa, Homo sapiens [sequence omitted]

SEQ ID NO: 176 - protein, 369 aa, Homo sapiens [sequence omitted]

SEQ ID NO: 177 - protein, 443 aa, Homo sapiens [sequence omitted]

SEQ ID NO: 178 - protein, 3418 aa, Homo sapiens
  VARIANT 718, 2261: Xaa = Any Amino Acid
MPIGSKERPTFFEIFKTRCNKADLGPISLNWFEELSSEAPPYNSEPAEESEHKNNNYEPNLFKTPQRKPSYNQLASTPIIFKEQGLTLPLYQSPVKELDKFKLDLGRNVPNSRHKSLRTVKTKMDQADDVSCPLLNSCLSESPVVLQCTHVTPQRDKSVVCGSLFHTPKFVKGRQTPKHISESLGAEVDPDMSWSSSLATPPTLSSTVLIVRNEEASETVFPHDTTANVKSYFSNHDESLKKNDRFIASVTDSENTNQREAASHGFGKTSGNSFKVNSCKDHIGKSMPNVLEDEVYETVVDTSEEDSFSLCFSKCRTKNLQKVRTSKTRKKIFHEANADECEKSKNQVKEKYSFVSEVEPNDTDPLDSNVANQKPFESGSDKISKEVVPSLACEWSQLTLSGLNGAQMEKIPLLHISSCDQNISEKDLLDTENKRKKDFLTSENSLPRISSLPKSEKPLNEETVVNKRDEEQHLESHTDCILAVKQAISGTSPVASSFQGIKKSIFRIRESPKETFNASFSGHMTDPNFKKETEASESGLEIHTVCSQKEDSLCPNLIDNGSWPATTTQNSVALKNAGLISTLKKKTNKFIYAIHDETSYKGKKIPKDQKSELINCSAQFEANAFEAPLTFANADSGLLHSSVKRSCSQNDSEEPTLSLTSSFGTILRKCSRNETCSNNTVISQDLDYKEAKCNKEKLQLFITPEADSLSCLQEGQCXNDPKSKKVSDIKEEVLAAACHPVQHSKVEYSDTDFQSQKNLLYDHENASTLILTPTSKDVLSNLVMISRGKESYKMSDKLKGNNYESDVELTKNIPMEKNQDVCALNENYKNVELLPPEKYMRVASPSRKVQFNQNTNLRVIQKNQEETTSISKITVNPDSEELFSDNENNFVFQVANERNNLALGNTKELHETDLTCVNEPIFKNSTMVLYGDTGDKQATQVSIKKDLVYVLAEENKNSVKQHIKMTLGQDLKSDISLNIDKIPEKNNDYMNKWAGLLGPISNHSFGGSFRTASNKEIKLSEHNIKKSKMFFKDIEEQYPTSLACVEIVNTLALDNQKKLSKPQSINTVSAHLQSSVVVSDCKNSHITPQMLFSKQDFNSNHNLTPSQKAEITELSTILEESGSQFEFTQFRKPSYILQKSTFEVPENQMTILKTTSEECRDADLHVIMNAPSIGQVDSSKQFEGTVEIKRKFAGLLKNDCNKSASGYLTDENEVGFRGFYSAHGTKLNVSTEALQKAVKLFSDIENISEETSAEVHPISLSSSKCHDSVVSMFKIENHNDKTVSEKNNKCQLILQNNIEMTTGTFVEEITENYKRNTENEDNKYTAASRNSHNLEFDGSDSSKNDTVCIHKDETDLLFTDQHNICLKLSGQFMKEGNTQIKEDLSDLTFLEVAKAQEACHGNTSNKEQLTATKTEQNIKDFETSDTFFQTASGKNISVAKESFNKIVNFFDQKPEELHNFSLNSELHSDIRKNKMDILSYEETDIVKHKILKESVPVGTGNQLVTFQGQPERDEKIKEPTLLGFHTASGKKVKIAKESLDKVKNLFDEKEQGTSEITSFSHQWAKTLKYREACKDLELACETIEITAAPKCKEMQNSLNNDKNLVSIETVVPPKLLSDNLCRQTENLKTSKSIFLKVKVHENVEKETAKSPATCYTNQSPYSVIENSALAFYTSCSRKTSVSQTSLLEAKKWLREGIFDGQPERINTADYVGNYLYENNSNSTIAENDKNHLSEKQDTYLSNSSMSNSYSYHSDEVYNDSRILSKNNLDSGIEPVLKNVEDQKNTSFSKVISNVKDANAYPQTVNEDICVEELVTSSSPCKNKNAAIKLSISNSNNFEVGPPAFRIASGKIVCVSHETIKKVKDIFTDSFSKVIKENNENKSKICQTKIMAGCYEALDDSEDILHNSLDNDECSTHSHKVFADIQSEEILQHNQNMSGLEKVSKISPCDVSLETSDICKCSIGKLHKSVSSANTCGIFSTASGKSVQVSDASLQNARQVFSEIEDSTKQVFSKVLFKSNEHSDQLTREENTAIRTPEHLISQKGFSYNVVNSSAFSGFSTASGKQVSILESSLHKVKGVLEEFDLIRTEHSLHYSPTSRQNVSKILPRVDKRNPEHCVNSEMEKTCSKEFKLSNNLNVEGGSSENNHSIKVSPYLSQFQQDKQQLVLGTKVSLVENIHVLGKEQASPKNVKMEIGKTETFSDVPVKTNIEVCSTYSKDSENYFETEAVEIAKAFMEDDELTDSKLPSHATHSLFTCPENEXMVLSNSRIGKRRGEPLILVGEPSIKRNLLNEFDRIIENQEKSLKASKSTPDGTIKDRRLFMHHVSLEPITCVPFRTTKERQEIQNPNFTAPGQEFLSKSHLYEHLTLEKSSSNLAVSGHPFYQVSATRNEKMRHLITTGRPTKVFVPPFKTKSHFHRVEQCVRNINLEENRQKQNIDGHGSDDSKNKINDNEIHQFNKNNSNQAAAVTFTKCEEEPLDLITSLQNARDIQDMRIKKKQRQRVFPQPGSLYLAKTSTLPRISLKAAVGGQVPSACSHKQLYTYGVSKHCIKINSKNAESFQFHTEDYFGKESLWTGKGIQLADGGWLIPSNDGKAGKEEFYRALCDTPGVDPKLISRIWVYNHYRWIIWKLAAMECAFPKEFANRCLSPERVLLQLKYRYDTEIDRSRRSAIKKIMERDDTAAKTLVLCVSDIISLSANISETSSNKTSSADTQKVAIIELTDGWYAVKAQLDPPLLAVLKNGRLTVGQKIILHGAELVGSPDACTPLEAPESLMLKISANSTRPARWYTKLGFFPDPRPFPLPLSSLFSDGGNVGCVDVIIQRAYPIQWMEKTSSGLYIFRNEREEEKEAAKYVEAQQKRLEALFTKIQEEFEEHEENTTKPYLPSRALTRQQVRALQDGAELYEAVKNAADPAYLEGYFSEEQLRALNNHRQMLNDKKQAQIQLEIRKAMESAEQKEQGLSRDVTTVWKLRIVSYSKKEKDSVILSIWRPSSDLYSLLTEGKRYRIYHLATSKSKSKSERANIQLAATKKTQYQQLPVSDEILFQIYQPREPLHFSKFLDPDFQPSCSEVDLIGFVVSVVKKTGLAPFVYLSDECYNLLAIKFWIDLNEDIIKPHMLIAASNLQWRPESKSGLLTLFAGDFSVFSASPKEGHFQETFNKMKNTVENIDILCNEAENKLMHILHANDPKWSTPTKDCTSGPYTAQIIPGTGNKLLMSSPNCEIYYQSPLSLCMAKRKSVSTPVSAQMTSKSCKGEKEIDDQKNCKKRRALDFLSRLPLPPPVSPICTFVSPAAQKAFQPPRSCGTKYETPIKKKELNSPQMTPFKKFNEISLLESNSIADEELALINTQALLSGSTGEKQFISVSESTRTAPTSSEDYLRLKRRCTTSLIKEQESSQASTEECEKNKQDTITTKKYI

SEQ ID NO: 179 - protein, 388 aa, Homo sapiens
MGDAPSPEEKLHLITRNLQEVLGEEKLKEILKERELKIYWGTATTGKPHVAYFVPMSKIADFLKAGCEVTILFADLHAYLDNMKAPWELLELRVSYYENVIKAMLESIGVPLEKLKFIKGTDYQLSKEYTLDVYRLSSVVTQHDSKKAGAEVVKQVEHPLLSGLLYPGLQALDEEYLKVDAQFGGIDQRKIFTFAEKYLPALGYSKRVHLMNPMVPGLTGSKMSSSEEESKIDLLDRKEDVKKKLKKAFCEPGNVENNGVLSFIKHVLFPLKSEFVILRDEKWGGNKTYTAYVDLEKDFAAEVVHPGDLKNSVEVALNKLLDPIREKFNTPALKKLASAAYPDPSKQKPMAKGLPRIQNQRRSSHPGWISVWGKSSLWRSTQMQTACM

SEQ ID NO: 180 - protein, 54 aa, Homo sapiens
MEWNGMAWNRIKWNGINSSGMEWNGMEWNAVQCNRMEWNELELTGMEWNGMHLN

SEQ ID NO: 181 - protein, 641 aa, Homo sapiens
DKPTANIILNGQKLQAFPLKTGTRQGCPLSPLLFNIVLEVLARAIRQEKEIKGIQLGKEEVKLSLFADDMIVYLENPIVSAQNLLKLISNFSKVSGYKINVQKSQAFLYTNNRQTESQIMSELPFTIASKRIKYLGIQLTRDVKDLFKENYKPLLKEIKEDTNKWKNIPCSWVGRINIVKMAILPKVIYRFNAIPIKLPMTFFTELEKTTLKFIWNQKRARIAKSILSQKNKAGGITLPDFKLYYKATVTKTAWYWYQNRDIDQWNRTEPSEIMPHIYNYLIFDKPEKNKQWGKDSLFNKWCWENWLAICRKLKLDPFLTPYTKINSRWIKDLNVRPKTIKTLEENLGITIEDIGVGKDFMSKTPKAMATKAKIDKWDLIKLKSFCTAKETTIRVNRQPTTWEKIFATYSSDKGLISRIYNELKQIYKKKTNNPIKKWAKDMNRHFSKEDIYAAKKHMKKCSSSLAIREMQIKTTMRYHLTPVRMAIIKKSGNNRCWRGCGEIGTLLHCWWDCKLVQPLWKSVWRFLRDLELEIPFDPAIPLLGIYPNDYKSCCYKDTCTRMFIAALFTIAKTWNQPKCPTMIDWIKKMWHIYTMEYYAAIKNDEFMSFVGTWMKLETIILSKLSQEQKTKHRIFSLIGGN

SEQ ID NO: 182 - protein, 435 aa, Homo sapiens
YKCGGIDKRTIEKFEKEAAEMGKGSFKYAWVLDKLKAERERGITIDISLWKFETTKYYITIIDAPGHRDFIKNMITGTSQADCAVLIVAAGVGEFEAGISKNGQTREHALLAYTLGVKQLIVGVNKMDSTEPAYSEKRYDEIVKEVSAYIKKIGYNPATVPFVPISGWHGDNMLEPSPNMPWFKGWKVERKEGNASGVSLLEALDTILPPTRPTDKPLRLPLQDVYKIGGIGTVPVGRVETGILRPGMVVTFAPVNITTEVKSVEMHHEALSEALPGDNVGFNVKNVSVKDIRRGNVCGDSKSDPPQEAAQFTSQVIILNHPGQISAGYSPVIDCHTAHIACKFAELKEKIDRRSGKKLEDNPKSLKSGDAAIVEMVPGKPMCVESFSQYPPLGRFAVPDMRQTVAVGVIKNVEKKSGGAGKVTKSAQKAQKAGK

SEQ ID NO: 183 - protein, 126 aa, Homo sapiens
FSTASAVPLAKTDTWPKDVGILALEVYFPAQYVDQTDLEKYNNVEAGKYTVGLGQTRMGFCSVQEDINSLCLTVVQRLMERIQLPWDSVGRLEVGTETIIDKSKAVKTVLMELFQDSGNTDIEGID

SEQ ID NO: 184 - protein, 2644 aa, Homo sapiens
MGEHGLELASMIPALRELGSATPEEYNTVVQKPRQILCQFIDRILTDVNVVAVELVKKTDSQPTSVMLLDFIQHIMKSSPLMFVNVSGSHEAKGSCIEFSNWIITRLLRIAATPSCHLLHKKICEVICSLLFLFKSKSPAIFGVLTKELLQLFEDLVYLHRRNVMGHAVEWPVVMSRFLSQLDEHMGYLQSAPLQLMSMQNLEFIEVTLLMVLTRIIAIVFFRRQELLLWQIGCVLLEYGSPKIKSLAISFLTELFQLGGLPAQPASTFFSSFLELLKHLVEMDTDQLKLYEEPLSKLIKTLFPFEAEAYRNIEPVYLNMLLEKLCVMFEDGVLMRLKSDLLKAALCHLLQYFLKFVPAGYESALQVRKVYVRNICKALLDVLGIEVDAEYLLGPLYAALKMESMEIIEEIQCQTQQENLSSNSDGISPKRRRLSSSLNPSKRAPKQTEEIKHVDMNQKSILWSALKQKAESLQISLEYSGLKNPVIEMLEGIAVVLQLTALCTVHCSHQNMNCRTFKDCQHKSKKKPSVVITWMSLDFYTKVLKSCRSLLESVQKLDLEATIDKVVKIYDALIYMQVNSSFEDHILEDLCGMLSLPWIYSHSDDGCLKLTTFAANLLTLSCRISDSYSPQAQSRCVFLLTLFPRRIFLEWRTAVYNWALQSSHEVIRASCVSGFFILLQQQNSCNRVPKILIDKVKDDSDIVKKEFASILGQLVCTLHGMFYLTSSLTEPFSEHGHVDLFCRNLKATSQHECSSSQLKASVCKPFLFLLKKKIPSPVKLAFIDNLHHLCKHLDFREDETDVKAVLGTLLNLMEDPDKDVRVAFSGNIKHILESLDSEDGFIKELFVLRMKEAYTHAQISRNNELKDTLILTTGDIGRAAKGDLVPFALLHLLHCLLSKSASVSGAAYTEIRALVAAKSVKLQSFFSQYKKPICQFLVESLHSSQMTALPNTPCQNADVRKQDVAHQREMALNTLSEIANVFDFPDLNRFLTRTLQVLLPDLAAKASPAASALIRTLGKQLNVNRREILINNFKYIFSHLVCSCSKDELERALHYLKNETEIELGSLLRQDFQGLHNELLLRIGEHYQQVFNGLSILASFASSDDPYQGPRDIISPELMADYLQPKLLGILAFFNMQLLSSSVGIEDKKMALNSLMSLMKLMGPKHVSSVRVKMMTTLRTGLRFKDDFPELCCRAWDCFVRCLDHACLGSLLSHVIVALLPLIHIQPKETAAIFHYLIIENRDAVQDFLHEIYFLPDHPELKKIKAVLQEYRKETSESTDLQTTLQLSMKAIQHENVDVRIHALTSLKETLYKNQEKLIKYATDSETVEPIISQLVTVLLKGCQDANSQARLLCGECLGELGAIDPGRLDFSTTETQGKDFTFVTGVEDSSFAYGLLMELTRAYLAYADNSRAQDSAAYAIQELLSIYDCREMETNGPGHQLWRRFPEHVREILEPHLNTRYKSSQKSTDWSGVKKPIYLSKLGSNFAEWSASWAGYLITKVRHDLASKIFTCCSIMMKHDFKVTIYLLPHILVYVLLGCNQEDQQEVYAEIMAVLKHDDQHTINTQDIASDLCQLSTQTVFSMLDHLTQWARHKFQALKAEKCPHSKSNRNKVDSMVSTVDYEDYQSVTRFLDLIPQDTLAVASFRSKAYTRAVMHFESFITEKKQNIQEHLGFLQKLYAAMHEPDGVAGVSAIRKAEPSLKEQILEHESLGLLRDATACYDRAIQLEPDQIIHYHGVVKSMLGLGQLSTVITQVNGVHANRSEWTDELNTYRVEAAWKLSQWDLVENYLAADGKSTTWSVRLGQLLLSAKKRDITAFYDSLKLVRAEQIVPLSAASFERGSYQRGYEYIVRLHMLCELEHSIKPLFQHSPGDSSQEDSLNWVARLEMTQNSYRAKEPILALRRALLSLNKRPDYNEMVGECWLQSARVARKAGHHQTAYNALLNAGESRLAELYVERAKWLWSKGDVHQALIVLQKGVELCFPENETPPEGKNMLIHGRAMLLVGRFMEETANFESNAIMKKYKDVTACLPEWEDGHFYLAKYYDKLMPMVTDNKMEKQGDLIRYIVLHFGRSLQYGNQFIYQSMPRMLTLWLDYGTKAYEWEKAGRSDRVQMRNDLGKINKVITEHTNYLAPYQFLTAFSQLISRICHSHDEVFVVLMEIIAKVFLAYPQQAMWMMTAVSKSSYPMRVNRCKEILNKAIHMKKSLEKFVGDATRLTDKLLELCNKPVDGSSSTLSMSTHFKMLKKLVEEATFSEILIPLQSVMIPTLPSILGTHANHASHEPFPGHWAYIAGFDDMVEILASLQKPKKISLKGSDGKFYIMMCKPKDDLRKDCRLMEFNSLINKCLRKDAESRRRELHIRTYAVIPLNDECGIIEWVNNTAGLRPILTKLYKEKGVYMTGKELRQCMLPKSAALSEKLKVFREFLLPRHPPIFHEWFLRTFPDPTSWYSSRSAYCRSTAVMSMVGYILGLGDRHGENILFDSLTGECVHVDFNCLFNKGETFEVPEIVPFRLTHNMVNGMGPMGTEGLFRRACEVTMRLMRDQREPLMSVLKTFLHDPLVEWSKPVKGHSKAPLNETGEVVNEKAKTHVLDIEQRLQGVIKTRNRVTGLPLSIEGHVHYLIQEATDENLLCQMYLGWTPYM

SEQ ID NO: 185 - protein, 154 aa, Homo sapiens [sequence omitted]

SEQ ID NO: 186 - protein, 55 aa, Homo sapiens
PRQEPPKIHLDCPGRIPDTIVVVAGNKLRLDVPISGDPAPTVIWQKAITQGNKAP

SEQ ID NO: 187 - protein, 24 aa, Homo sapiens [sequence omitted]

SEQ ID NO: 188 - protein, 167 aa, Homo sapiens [sequence omitted]

SEQ ID NO: 189 - protein, 318 aa, Homo sapiens [sequence omitted]

SEQ ID NO: 190 - protein, 347 aa, Homo sapiens [sequence omitted]

SEQ ID NO: 191 - protein, 513 aa, Homo sapiens [sequence omitted]

SEQ ID NO: 192 - protein, 226 aa, Homo sapiens [sequence omitted]

SEQ ID NO: 193 - protein, 305 aa, Homo sapiens
VSTSSMGTLPKRVKIVEVGPQDGLQNEKNIVSTPVKIKLIDMLSEAGLSVIETTSFVSPKWVPQMGDHTEVLKGIQKFPGINYPVLTPNLKGFEAAVAAGAKEVVIFGAASELFTKKNINCSIEESFQRFDAILKAAQSANISVRGYVSCALGCPYEGKISPAKVAEVTKKFYSMGCYEISLGDTIGVGTPGIMKDMLSAVMQEVPLAALAVHCHDTYGQALANTLMALQMGVSVVDSSVAGLGGCPYAQGASGNLATEDLVYMLEGLGIHTGVNLQKLLEAGNFICQALNRKTSSKVAQATCKL

SEQ ID NO: 194 - protein, 536 aa, Homo sapiens [sequence omitted]

SEQ ID NO: 195 - protein, 3002 aa, Homo sapiens
YFSREKPLRGRYLKRWGKEGAAGAAAETVGATSGQEPQLGQLRAEPSSGCSGHDWEQPPPPPRESEPPLLHWQGPPEVGAAPGEGGRSPARGTGGGIAGPRRRGALQGAAAAADRAPGAARGGGSRWRLGIMRRGRLLEIALGFTVLLASYTSHGADANLEAGNVKETRASRAKRRGGGGHDALKGPNVCGSRYNAYCCPGWKTLPGGNQCIVPICRHSCGDGFCSRPNMCTCPSGQIAPSCGSRSIQHCNIRCMNGGSCSDDHCLCQKGYIGTHCGQPVCESGCLNGGRCVAPNRCACTYGFTGPQCERDYRTGPCFTVISNQMCQGQLSGIVCTKTLCCATVGRAWGHPCEMCPAQPHPCRRGFIPNIRTGACQDVDECQAIPGLCQGGNCINTVGSFECKCPAGHKLNEVSQKCEDIDECSTIPGICEGGECTNTVSSYFCKCPPGFYTSPDGTRCIDVRPGYCYTALTNGRCSNQLPQSITKMQCCCDAGRCWSPGVTVAPEMCPIRATEDFNKLCSVPMVIPGRPEYPPPPLGPIPPVLPVPPGFPPGPQIPVPRPPVEYLYPSREPPRVLPVNVTDYCQLVRYLCQNGRCIPTPGSYRCECNKGFQLDLRGECIDVDECEKNPCAGGECINNQGSYTCQCRAGYQSTLTRTECRDIDECLQNGRICNNGRCINTDGSFHCVCNAGFHVTRDGKNCEDMDECSIRNMCLNGMCINEDGSFKCICKPGFQLASDGRYCKDINECETPGICMNGRCVNTDGSYRCECFPGLAVGLDGRVCVDTHMRSTCYGGYKRGQCIKPLFGAVTKSECCCASTEYAFGEPCQPCPAQNSAEYQALCSSGPGMTSAGSDINECALDPDICPNGICENLRGTYKCICNSGYEVDSTGKNCVDINECVLNSLLCDNGQCRNTPGSFVCTCPKGFIYKPDLKTCEDIDECESSPCINGVCKNSPGSFICECSSESTLDPTKTICIETIKGTCWQTVIDGRCEININGATLKSQCCSSLGAAWGSPCTLCQVDPICGKGYSRIKGTQCEDIDECEVFPGVCKNGLCVNTRGSFKCQCPSGMTLDATGRICLDIRLETCFLRYEDEECTLPIAGRHRMDACCCSVGAAWGTEECEECPMRNTPEYEELCPRGPGFATKEITNGKPFFKDINECKMIPSLCTHGKCRNTIGSFKCRCDSGFALDSEERNCTDIDECRISPDLCGRGQCVNTPGDFECKCDEGYESGFMMMKNCMDIDECQRDPLLCRGGVCHNTEGSYRCECPPGHQLSPNISACIDINECELSAHLCPNGRCVNLIGKYQCACNPGYHSTPDRLFCVDIDECSIMNGGCETFCTNSEGSYECSCQPGFALMPDQRSCTDIDECEDNPNICDGGQCTNIPGEYRCLCYDGFMASEDMKTCVDVNECDLNPNICLSGTCENTKGSFICHCDMGYSGKKGKTGCTDINECEIGAHNCGKHAVCTNTAGSFKCSCSPGWIGDGIKCTDLDECSNGTHMCSQHADCKNTMGSYRCLCKEGYTGDGFTCTDLDECSENLNLCGNGQCLNAPGGYRCECDMGFVPSADGKACEDIDECSLPNICVFGTCHNLPGLFRCECEIGYELDRSGGNCTDVNECLDPTTCISGNCVNTPGSYICDCPPDFELNPTRVGCVDTRSGNCYLDIRPRGDNGDTACSNEIGVGVSKASCCCSLGKAWGTPCEMCPAVNTSEYKILCPGGEGFRPNPITVILEDIDECQELPGLCQGGKCINTFGSFQCRCPTGYYLNEDTRVCDDVNECETPGICGPGTCYNTVGNYTCICPPDYMQVNGGNNCMDMRRSLCYRNYYADNQTCDGELLFNMTKKMCCCSYNIGRAWNKPCEQCPIPSTDEFATLCGSQRPGFVIDIYTGLPVDIDECREIPGVCENGVCINMVGSFRCECPVGFFYNDKLLVCEDIDECQNGPVCQRNAECINTAGSYRCDCKPGYRFTSTGQCNDRNECQEIPNICSHGQCIDTVGSFYCLCHTGFKTNDDQTMCLDINECERDACGNGTCRNTIGSFNCRCNHGFILSHNNDCIDVDECASGNGNLCRNGQCINTVGSFQCQCNEGYEVAPDGRTCVDINECLLEPRKCAPGTCQNLDGSYRCICPPGYSLQNEKCEDIDECVEEPEICALGTCSNTEGSFKCLCPEGFSLSSSGRRCQDLRMSYCYAKFEGGKCSSPKSRNHSKQECCCALKGEGWGDPCELCPTEPDEAFRQICPYGSGIIVGPDDSAVDMDECKEPDVCKHGQCINTDGSYRCECPFGYTLAGNECVDTDECSVGNPCGNGTCKNVIGGFECTCEEGFEPGPMMTCEDINECAQNPLLCAFRCVNTYGSYECKCPVGYVLREDRRMCKDEDECEEGKHDCTEKQMECKNLIGTYMCICGPGYQRRPDGEGCVDENECQTKPGICENGRCLNTRGSYTCECNDGFTASPNQDECLDNREGYCFTEVLQNMCQIGSSNRNPVTKSECCCDGGRGWGPHCEICPFQGTVAFKKLCPHGRGFMTNGADIDECKVIHDVCRNGECVNDRGSYHCICKTGYTPDITGTSCVDLNECNQAPKPCNFICKNTEGSYQCSCPKGYILQEDGRSCKDLDECATKQHNCQFLCVNTIGGFTCKCPPGFTQHHTSCIDNNECTSDINLCGSKGICQNTPGSFTCECQRGFSLDQTGSSCEDVDECEGNHRCQHGCQNIIGGYRCSCPQGYLQHYQWNQCVDENECLSAHICGGASCHNTLGSYKCMCPAGFQYEQFSGGCQDINECGSAQAPCSYGCSNTEGGYLCGCPPGYFRIGQGHCVSGMGMGRGNPEPPVSGEMDDNSLSPEACYECKINGYPKRGRKRRSTNETDASNIEDQSETEANVSLASWDVEKTAIFAFNISHVSNKVRILELLPALTTLTNHNRYLIESGNEDGFFKINQKEGISYLHFTKKKPVAGTYSLQISSTPLYKKKELNQLEDKYDKDYLSGELGDNLKMKIQVLLH

SEQ ID NO: 196 - protein, 34 aa, Homo sapiens
QLGPQGPPHLVADPSKKQGPWLEEEEEAYGWMDF

SEQ ID NO: 197 - protein, 238 aa, Homo sapiens
IVGGRRARPHAWPFMVSLQLRGGHFCGATLIAPNFVMSAAHCVANVNVRAVRVVLGAHNLSRREPTRQVFAVQRIFENGYDPVNLLNDIVILQLNGSATINANVQVAQLPAQGRRLGNGVQCLAMGWGLLGRNRGIASVLQELNVTVVTSLCRRSNVCTLVRGRQAGVCFGDSGSPLVCNGLIHGIASFVRGGCASGLYPDAFAPVAQFVNWIDSIIQRSEDNPCPHPRDPDPASRTH

SEQ ID NO: 198 - protein, 617 aa, Homo sapiens
VLLWSANKVFEELTDIERQFHKAFYTVRAYLNCERYSVGLLDMTKEKEFFDVWSVLMGESQPYSGPRTPDGREIVFYKVIDYILHGKEEIKVIPTPSADHWALASGLPSYVAESGFICNIMNASADEMFKFQEGALDDSGWLIKNVLSMPIVNKKEEIVGVATFYNRKDGKPFDEQDEVLMESLTQFLGWSVMNTDTYDKMNKLENRKDIAQDMVLYHVKCDRDEIQLILPTRARLGKEPADCDEDELGEILKEELPGPTTFDIYEFHFSDLECTELDLVKCGIQMYYELGVVRKFQIPQEVLVRFLFSISKGYRRITYHNWRHGFNVAQTMFTLLMTGKLKSYYTDLEAFAMVTAGLCHDIDHRGTNNLYQMKSQNPLAKLHGSSILERHHLEFGKFLLSEETLNIYQNLNRRQHEHVIHLMDIAIIATDLALYFKKRAMFQKIVDESKNYQDKKSWVEYLSLETTRKEIVMAMMMTACDLSAITKPWEVQSKVALLVAAEFWEQGDLERTVLDQQPIPMMDRNKAAELPKLQVGFIDFVCTFVYKEFSRFHEEILPMFDRLQNNRKEWKALADEYEAKVKALEEKEEEERVAAKKVGTEICNGGPAPKSSTCCIL

SEQ ID NO: 199 - protein, 276 aa, Homo sapiens
ESHKDDAHKEETSPNVPHLLQESHKDHPHKEETSPKVPHLLQESQKDDPHKEATSPKVPHLIQESQKDHPHKEETSPKVPHLIQESQKADPHKEDTSPKVPHLLQESRKDHPHKEETSPKVPHLLQESQKDDPHKEATSPKVPHLIQESQKDHPHKEATSPTVPHLLQESQKDHPHKEATSPKVPHLIQESQKDHPHRKETSPEVPDLLQESHKDHPNKKATSLKVPHLLESHKAHPHQEAIPSSLRHLLLESPRGHLHLLKGAGHPDLPRDNSLP

SEQ ID NO: 200 - protein, 442 aa, Homo sapiens
TTPDRRLWNPPATSSSLRQMERMLPLLTLGLLAAGFCPAVLCHPNSPLDEENLTQENQDRGTHVDLGLASANVDFAFSLYKQLVLKAPDKNVIFSPLSISTALAFLSLGAHNTTLTEILKGLKFNLTETSEAEIHQSFQHLLRTLNQSSDELQLSMGNAMFVKEQLSLLDRFTEDAKRLYGSEAFATDFQDSAAAKKLINDYVKNGTRGKITDLIKDLDSQTMMVLVNYIFFKAKWEMPFDPQDTHQSRFYLSKKKWVMVPMMSLHHLTIPYFRDEELSCTVVELKYTGNASALFILPDQDKMEEVEAMLLPETLKRWRDSLEFREIGELYLPKFSISRDYNLNDILLQLGIEEAFTSKADLSGITGARNLAVSQVVHKAVLDVFEEGTEASAATAVKITLLSALVETRTIVRFNRPFLMIIVPTDTQNIFFMSKVTNPKQA

SEQ ID NO: 201 - protein, 247 aa, Homo sapiens
MQAPRELAVGIDLGTTYSCVGVFQQGRVEILANDQGNRTTPSYVAFTDTERLVGDAAKNQAALNPHNTVFDAKRLIGRKFADTTVQSDMKHWPFKVVSGGGKPKVRVCYRGEDKTFYPEEISSMVLTKMKETAEAYLGQPVKHAVITVPTYFSNSQRQATKDAGAIAGLKVLPIINEATAAAIAYGLDRRRAGKRNVLIFDLGGGTFDVSVLTIDAGVFEVKATAGDTHLGGEDFDNRLVNHFMEEF

SEQ ID NO: 202 - protein, 1683 aa, Homo sapiens
MPGIKVGGSGVNVNAKGLDLGGRGGVQVPAVDISSSLGGRPVEVQGPSLESGDHAKIKFPTMKVPKFGVSTGREGQTPKAGLRVSAPEVSVGHKGGKPGLTIQAPQLEVSVPSANIEGLEGKLKGPQITGPSLEGDLGLKGAKPQGHIGVDASAPQIGGSITGPSVEVQAPDIDVQGPGSKLNVPKMKVPKFSVSGAKGEETGIDVTLPTGEVTVPGVSGDVSLPEIATGGLEGKMKGTKVKTPEMIIQKPKISMQDVDLSLGSPKLKGDIKVSAPGVQGDVKGPQVALKGSRVDIETPNLEGTLTGPRLGSPSGKTGTCRISMSEVDLNVAAPKVKGGVDVTLPRVEGKVKVPEVDVRGPKVDVSAPDVEAHGPEWNLKMPKMKMPTFSTPGAKGEGPDVHMTLPKGDISISGPKVNVEAPDVNLEGLGGKLKGPDVKLPDMSVKTPKISMPDVDLHVKGTKVKGEYDVTVPKLEGELKGPKVDIDAPDVDVHGPDWHLKMPKMKMPKFSVPGFKAEGPEVDVNLPKADVDISGPKIDVTAPDVSIEEPEGKLKGPKFKMPEMNIKVPKISMPDVDLHLKGPNVKGEYDVTMPKVESEIKVPDVELKSAKMDIDVPDVEVQGPDWHLKMPKMKMPKFSMPGFKAEGPEVDVNLPKADVDISGPKVGVEVPDVNIEGPEGKLKGPKFKMPEMNIKAPKISMPDVDLHMKGPKVKGEYDMTVPKLEGDLKGPKVDVSAPDVEMQGPDWNLKMPKIKMPKFSMPSLKGEGPEFDVNLSKANVDISAPKVDTNAPDLSLEGPEGKLKGPKFKMPEMHFRAPKMSLPDVDLDLKGPKMKGNVDISAPKIEGEMQVPDVDIRGPKVDIKAPDVEGQGLDWSLKIPKMKMPKFSMPSLKGEGPEVDVNLPKADVDVSGPKVDIEAPDVSLEGPEGKLKGPKFKMPEMHFKTPKISMPDVDLHLKGPKVKGDVDVSVPKVEGEMKVPDVEIKGPKMDIDAPDVEVQGPDWHLKMPKMKMPKFSMPGFKGEGREVDVNLPKADIDVSGPKVDVEVPDVSLEGPEGKLKGPKFKMPEMHFKAPKISMPDVDLNLKGPKLKGDVDVSLPEVEGEMKVPDVDIKGPKVDISAPDVDVHGPDWHLKMPKVKMPKFSMPGFKGEGPEVDVKLPKADVDVSGPKMDAEVPDVNIEGPDAKLKGPKFKMPEMSIKPQKISIPDVGLHLKGPKMKGDYDVTVPKVEGEIKAPDVDIKGPKVDINAPDVEVHGPDWHLKMPKVKMPKFSMPGFKGEGPEVDMNLPKADLGVSGPKVDIDVPDVNLEAPEGKLKGPKFKMPSMNIQTHKISMPDVGLNLKAPKLKTDVDVSLPKVEGDLKGPEIDVKAPKMDVNVGDIDIEGPEGKLKGPKFKMPEMHFKAPKISMPDVDLHLKGPKVKGDMDVSVPKVEGEMKVPDVDIKGPKVDIDAPDVEVHDPDWHLKMPKMKMPKFSMPGFKAEGPEVDVNLRKADIDVSGPSVDTDAPDLDIEGPEGKLKGSKFKMPKLNIKAPKVSMPDVDLNLKGPKLKGEIDASVPELEGDLRGPQVDVKGPLVEAEVPDVDLECPDAKLKGPKFKMPEMHFKAPKISMPDVDLHLKGPKVKGDADVSVPKLEGDLTGPSVGVEVPDVELECPDAKLKGPKFKMPDMHFKAPKISMPDVDLH

SEQ ID NO: 203 - protein, 1683 aa, Homo sapiens; identical to SEQ ID NO: 202

SEQ ID NO: 204 - protein, 1277 aa, Homo sapiens
TLPKVEGDLKGPEADIKGPKVDINTPDVDVHGPDWHLKMPKVKMPKFSMPGFKGEGPDVDVNLPKADIDVSGPKVDVDVPDVNIEGPDAKLKGPKFKMPEMSIKAPKISMPDIDLNLKGPKVKGDVDVTLPKVEGDLKGPEADIKGPKVDINTPDVDVHGPDWHLKMPKVKMPKFSMPGFKGEGPDVDVSLPKADIDVSGPKVDVDIPDVNIEGPDPKLKVPKVKMPEINIKAPKISIPDVDLDLKGPKVKGDFDVSVPKVEGTLKGPEVDLKGPRLDFEGPDAKLSGPSLKMPSLEISAPKVTAPDVDLHLKAPKIGFSGPKLEGGEVDLKGPKVEAPSLDVHMDSPDINIEGPDVKIPKFKKPKFGFGPKSPKADIKSPSLDVTVPEAELNLETPEISVGGKGKKSKFKMPKIHMSGPKIKAKKQGFDLNVPGGEIDASLKAPDVDVNIAGPDAALKVDVKSPKTKKTMFGKMYFPDVEFDIKSPKFKAEAPLPSPKLEGELQAPDLELSLPAIHVEGLDIKAKAPKVKMPDVDISVPKIEGDLKGPKVQANLGAPDINIEGLDAKVKTPSFGISAPQVSIPDVNVNLKGPKIKGDVPSVGLEGPDVDLQGPEAKIKFPKFSMPKIGIPGVKMEGGGAEVHAQLPSLEGDLRGPDVKLEGPDVSLKGPGVDLPSVNLSMPKVSGPDLDLNLKGPSLKGDLDASVPSMKVHAPGLNLSGVGGKMQVGGDGVKVPGIDATTKLNVGAPDVTLRGPSLQGDLAVSGDIKCPKVSVGAPDLSLEASEGSIKLPKMKLPQFGISTPGSDLHVNAKGPQVSGELKGPGVDVNLKGSRISAPNVDFNLEGPKVKGSLGATGEIKGPTVGGGLPGIGVQGLEGNLQMPGIKSSGCDVNLPGVNVKLPTGQISGPEIKGGLKGSEVGFHGAAPDISVKGPAFNMASPESDFGINLKGPKIKGGADVSGGVSAPDISLGEGHLSVKGSGGEWKGPQVSSALNLDTSKFAGGLHFSGPKVEGGVKGGQIGLQAPGLSVSGPQGHLESGSGKVTFPKMKIPKFTFSGRELVGREMGVDVHFPKAEASIQAGAGDGEWEESEVKLKKSKIKMPKFNFSKPKGKGGVTGSPEASISGSKGDLKSSKASLGSLEGEAEAEASSPKGKFSLFKSKKPRHRSNSFSDEREFSGPSTPTGTLEFEGGEVSLEGGKVKGKHGKLKFGTFGGLGSKSKGHYEVTGSDDETGKLQGSGVSLASKKSRLSSSSSNDSGNKVGIQLPEVELSVSTKKE

SEQ ID NO: 205 - protein, 466 aa, Homo sapiens
EKAFEPATGRVIATFTCSGEKEVNLAVQNAKAAFKIWSQKSGMERCRILLEAARIIREREDEIATMECINNGKSIFEARLDIDISWQCLEYYAGLAASMAGEHIQLPGGSFGYTRREPLGVCVGIGAWNYPFQIASWKSAPALACGNAMVFKPSPFTPVSALLLAEIYSEAGVPPGLFNVVQGGAATGQFLCQHPDVAKVSFTGSVPTGMKIMEMSAKGIKPVTLELGGKSPLIIFSDCDMNNAVKGALMANFLTQGQVCCNGTRVFVQKEILDKFTEEVVKQTQRIKIGDPLLEDTRMGPLINRPHLERVLGFVKVAKEQGAKVLCGGDIYVPEDPKLKDGYYMRPCVLTNCRDDMTCVKEEIFGPVMSILSFDTEAEVLERANDTTFGLAAGVFTRDIQRAHRVVAELQAGTCFINNYNVSPVELPFGGYKKSGFGRENGRVTIEYYSQLKTVCVEMGDVESAF

SEQ ID NO: 206 - protein, 1015 aa, Homo sapiens [sequence omitted]

SEQ ID NO: 207 - protein, 1015 aa, Homo sapiens [sequence omitted]

SEQ ID NO: 208 - protein, 348 aa, Homo sapiens
NGTASSFCLDSTACKITITVVLAVLILITVAGNVVVCLAVGLNRRLRNLTNCFIVSLAITDLLLGLLVLPFSAIYQLSCKWSFGKVFCNIYTSLDVMLCTASILNLFMISLDRYCAVMDPLRYPVLVTPARVAISLVLIWVISITLSFLSIHLGWNSRNETSKGNHTTSKCNVQVNEVYGLVDGLVTFYLPLLIMCITYYRIFRVARDQAKRIDHISSWKAATIREHRATVTLAAVMGAFIICWFPYFTAFVYRGLRGDDAINEMLEAIVLWLGYANSALNPILYAALNRDFRTGYQQLFCCRLANRNSHKTSLRSNASQLSRTQSREPRQQEEKPLKLQVWSGTEVT

SEQ ID NO: 209 - protein, 962 aa, Homo sapiens [sequence omitted]

SEQ ID NO: 210 - protein, 150 aa, Homo sapiens
KAIVAGDQNVEYKGTVWHKDCFTCSNCKQVIGTGSFFPKGEDFYCVTCHETKLAKHCVKCNKAITSGGITYQDQPWHADCFVCVTCSKKLAGQRFTAVEDQYYCVDCYKNFVAKKCAGCKNPITGFGKGSSVVAYEGQSWHDYCFHCKKC

SEQ ID NO: 211 - protein, 397 aa, Homo sapiens
ARGLHFVKFAIDSDQLHQLWEKDQLNMAKNTWPILKGFQEGPLNFAPTFKFDVGTNKYDTSAKKRKPAWTDRILWKVKAPGGGPSPSGRKSHRLQVTQHSYRSHMEYTVSDHKPVAAQFLLQFAFRDDMPLVRLEVADEWVRPEQAVVRYRMETVFARSSWDWIGLYRVGFRHCKDYVAYVWAKHEDVDGNTYQVTFSEESLPKGHGDFILGYYSHNHSILIGITEPFQISLPSSELASSSTDSSGTSSEGEDDSTLELLAPKSRSPSPGKSKRHRSRSPGLARFPGLALRPSSRERRGASRSPSPQSRRLSRVAPDRSSNGSSRGSSEEGPSGLPGPWAFPPAVPRSLGLLPALRLETVDPGGGGSWGPDREALAPNSLSPSPQGHRGLEEGGLGP

SEQ ID NO: 212 - protein, 466 aa, Homo sapiens
EWRRGEGRDEDRSHRRDEERPRRLGDDEDREPSLRPDDDRVPRRGMDDDRGPRRGPEEDRFSRRGADDDRPSWRNTDDDRPPRRIADEDRGNWRHADDDRPPRRGLDEDRGSWRTADEDRGPRRGMDDDRGPRRGGADDERSSWRNADDDRGPRRGLDDDRGPRRGMDDDRGPRRGMDDDRGPRRGMDDDRGPRRGLDDDRGPWRNADDDRIPRRGAEDDRGPWRNMDDDRLSRRADDDRFPRRGDDSRPGPWRPLVKPGGWREKEKAREESWGPPRESRPSEEREWDREKERDRDNQDREENDKDPERERDRERDVDREDRFRRPRDEGGWRRGPAEESSSWRDSSRRDDRDRDDRRRERDDRRDLRERRDLRDDRDRRGPPLRSEREEVSSWRRADDRKDDRVEERDPPRRVPPPALSRDRERDRDREREGEKEKASWRAEKDRESLRRTKNETDEDGWTTVRR

SEQ ID NO: 213 - protein, 469 aa, Homo sapiens
MSQAYSSSQRVSSYRRTFGGAPGFPLGSPLSSPVFPRAGFGSKGSSSSVTSRVYQVSRTSGGAGGLGSLRASRLGTTRTPSSYGAGELLDFSLADAVNQEFLTTRTNEKVELQELNDRFANYIEKVRFLEQQNALAAEVNRLKGREPTRVAELYEEELRELRRQVEVLTNQRARVDVERDNLLDDLQRLKAKLQEEIQLKEEAENNLAAFRADVDAATLARIDLERRIESLNEEIAFLKKVHEEEIRELQAQLQEQQVQVEMDMSKPDLTAALRDIRAQYETIAAKNISEAEEWYKSKVSDLTQAANKNNDALRQAKQEMMEYRHQIQSYTCEIDALKGTNDSLMRQMRELEDRFASEASGYQDNIARLEEEIRHLKDEMARHLREYQDLLNVKMALDVEIATYRKLLEGEESRINLPIQTYSALNFRETSPEQRGSEVHTKKTVMIKTIETRDGEVVSEATQQQHEVL

SEQ ID NO: 214 - protein, 2412 aa, Homo sapiens
DLILPTIQKSLLRSPENVIETISSLLASVTLDLSQYAMDIVKGLAGHLKSNSPRLMDEAVLALRNLARQCSDSSAMESLTKHLFAILGGSEGKLTVVAQKMSVLSGIGSVSHHVVSGPSSQVLNGIVAELFIPFLQQEVHEGTLVHAVSVLALWCNRFTMEVPKKLTEWFKKAFSLKTSTSAVRHAYLQCMLASYRGDTLLQALDLLPLLIQTVEKAASQSTQVPTITEGVAAALLLLKLSVADSQAEAKLSSFWQLIVDEKKQVFTSEKFLVMASEDALCTVLHLTERLFLDHPHRLTGNKVQQYHRALVAVLLSRTWHVRRQAQQTVRKLLSSLGGFKLAHGLLEELKTVLSSHKVLPLEALVTDAGEVTEAGKAYVPPRVLQEALCVISGVPGLKGDVTDTEQLAQEMLIISHHPSLVAVQSGLWPALLARMKIDPEAFITRHLDQIIPRMTTQSPLNQSSMNAMGSLSVLSPDRVLPQLISTITASVQNPALRLVTREEFAIMQTPAGELYDKSIIQSAQQDSIKKANMKRENKAYSFKEQIIELELKEEIKKKKGIKEEVQLTSKQKEMLQAQLDREAQVRRRLQELDGELEAALGLLDIILAKNPSGLTQYIPVLVDSFLPLLKSPLAAPRIKNPFLSLAACVMPSRLKALGTLVSHVTLRLLKPECVLDKSWCQEELSVAVKRAVMLLHTHTITSRVGKGEPGAAPLSAPAFSLVFPFLKMVLTEMPHHSEEEEEWMAQILQILTVQAQLRASPNTPPGRVDENGPELLPRVAMLRLLTWVIGTGSPRLQVLASDTLTTLCASSSGDDGCAFAEQEEVDVLLCALQSPCASVRETVLRGLMELHMVLPAPDTDEKNGLNLLRRLWVVKFDKEEEIRKLAERLWSMMGLDLQPDLCSLLIDDVIYHEAAVRQAGAEALSQAVARYQRQAAEVMGRLMEIYQEKLYRPPPVLDALGRVISESPPDQWEARCGLALALNKLSQYLDSSQVKPLFQFFVPDALNDRHPDVRKCMLDAALATLNTHGKENVNSLLPVFEEFLKNAPNDASYDAVRQSVVVLMGSLAKHLDKSDPKVKPIVAKLIAALSTPSQQVQESVASCLPPLVPAIKEDAGGMIQRLMQQLLESDKYAERKGAAYGLAGLVKGLGILSLKQQEMMAALTDAIQDKKNFRRREGALFAFEMLCTMLGKLFEPYVVHVLPHLLLCFGDGNQYVREAADDCAKAVMSNLSAHGVKLVLPSLLAALEEESWRTKAGSVELLGAMAYCAPKQLSSCLPNIVPKLTEVLTDSHVKVQKAGQQALRQIGSVIRNPEILAIAPVLLDALTDPSRKTQKCLQTLLDTKFVHFIDAPSLALIMPIVQRAFQDRSTDTRKMAAQIIGNMYSLTDQKDLAPYLPSVTPGLKASLLDPVPEVRTVSAKALGAMVKGMGESCFEDLLPWLMETLTYEQSSVDRSGAAQGLAEVMAGLGVEKLEKLMPEIVATASKVDIAPHVRDGYIMMFNYLPITFGDKFTPYVGPIIPCILKALADENEFVRDTALRAGQRVISMYAETAIALLLPQLEQGLFDDLWRIRFSSVQLLGDLLFHISGVTGKMTTETASEDDNFGTAQSNKAIITALGVERRNRVLAGLYMGRSDTQLVVRQASLHVWKIVVSNTPRTLREILPTLFGLLLGFLASTCADKRTIAARTLGDLVRKLGEKILPEIIPILEEGLRSQKSDERQGVCIGLSEIMKSTSRDAVLYFSESLVPTARKALCDPLEEVREAAAKTFEQLHSTIGHQALEDILPFLLKQLDDEEVSEFALDGLKQVMAIKSRVVLPYLVPKLTTPPVNTRVLAFLSSVAGDALTRHLGVILPAVMLALKEKLGTPDEQLEMANCQAVILSVEDDTGHRIIIEDLLEATRSPEVGMRQAAAIILNIYCSRSKADYTSHLRSLVSGLIRLFNDSSPVVLEESWDALNAITKKLDAGNQLALIEELHKEIRLIGNESKGEHVPGFCLPKKGVTSILPVLREGVLTGSPEQKEEAAKALGLVIRLTSADALRPSVVSITGPLIRILGDRFSWNVKAALLETLSLLLAKVGIALKPFLPQLQTTFTKALQDSNRGVRLKAADALGKLISIHIKVDPLFTELLNGIRAMEDPGVRDTMLQALRFVIQGAGAKVDAVIRKNIVSLLLSMLGHDEDNTRISSAGCLGELCAFLTEEELSAVLQQCLLADVSGIDWMVRHGRSLALSVAVNVAPGRLCAGRYSSDVQEMILSSATADRIPIAVSGVRGMGFLMRHHIETGGGQLPAKLSSLFVKCLQNPSSDIRLVAEKMIWWANKDPLPPLDPQAIKPILKALLDNTKDKNTVVRAYSDQAIVNLLKMRQGEEVFQSLSKILDVASLEVLNEVNRRSLKKLASQADSTEQVDDTILT

SEQ ID NO: 215 - protein, 73 aa, Homo sapiens
MELPKLKLSGVVRLSSYSSPTLQSVLGSGTNGRVPVLRPLKCIPASKKTDPQKDLKPAPQQCRLPTIVRKGGR

SEQ ID NO: 216 - protein, 338 aa, Homo sapiens
MDQNNSLPPYAQGLASPQGAMTPGIPLFSPMMPYGTGLTPQPIQNTNSLSILEEQQRQQQQQQQQQQQQQQQQQQQQQQQQQQQQQQQQQQQQQAVAAAAVQQSTSQQATQGTSGQAPQLFHSQTLTTAPLPGTTPLYPSPMTPMTPITPATPASESSGIVPQLQNIVSTVNLGCKLDLKTIALRARNAEYNPKRFAAVIMRIREPRTTALIFSSGKMVCTGAKSEEQSRLAARKYARVVQKLGFPAKFLDFKIQNMVGSCDVKFPIRLEGLVLTHQQFSSYEPELFPGLIYRMIKPRIVLLIFVSGKVVLTGAKVRAEIYEAFENIYPILKGFRKTT

SEQ ID NO: 217 - protein, 198 aa, Homo sapiens [sequence omitted]

SEQ ID NO: 218 - protein, 1359 aa, Homo sapiens [sequence omitted]

SEQ ID NO: 219 - protein, 1862 aa, Homo sapiens [sequence omitted]

SEQ ID NO: 220 - protein, 268 aa, Homo sapiens [sequence omitted]

SEQ ID NO: 221 - protein, 86 aa, Homo sapiens
MAQPILGHGSLQPASAAGLASLELDSSLDQYVQIRIFKIIVIGDSNVGKTCLTFRFCGGTFPDKTEATIGVDFREKTVEIEGEKIK

SEQ ID NO: 222 - protein, 482 aa, Homo sapiens [sequence omitted]

SEQ ID NO: 223 - protein, 136 aa, Homo sapiens
MSAAVTAGKLARAPADPGKAGVPGVAAPGAPAAAPPAKEIPEVLVDPRSRRRYVRGRFLGKGGFAKCFEISDVDTKEVFAGKIVPKSLLLKPHQREKMSMEISIHRSLAHQHVVGFHGFFEDNDFVFVVLELCRRR

SEQ ID NO: 224 - protein, 452 aa, Homo sapiens
MAAATLLRATPHFSGLAAGRTFLLQGLLRLLKAPALPLLCRGLAVEAKKTYVRDKPHVNVGTIGHVDHGKTTLTAAITKILAEGGGAKFKKYEEIDNAPEERARGITINAAHVEYSTAARHYAHTDCPGHADYVKNMITGTAPLDGCILVVAANDGPMPQTREHLLLARQIGVEHVVVYVNKADAVQDSEMVELVELEIRELLTEFGYKGEETPVIVGSALCALEGRDPELGLKSVQKLLDAVDTYIPVPARDLEKPFLLPVEAVYSVPGRGTVVTGTLERGILKKGDECELLGHSKNIRTVVTGIEMFHKSLERAEAGDNLGALVRGLKREDLRRGLVMVKPGSIKPHQKVEAQVYILSKEEGGRHKPFVSHFMPVMFSLTWDMACRIILPPEKELAMPGEDLKFNLILRQPMILEKGQRFTLRDGNRTIGTGLVTNTLAMTEEEKNIKWG

SEQ ID NO: 225 - protein, 207 aa, Homo sapiens [sequence omitted]

SEQ ID NO: 226 - protein, 1360 aa, Homo sapiens [sequence omitted]

SEQ ID NO: 227 - protein, 1178 aa, Homo sapiens
MLKFRTVHGGLRLLGIRRTSTAPAASPNVRRLEYKPIKKVMVANRGEIAIRVFRACTELGIRTVAIYSEQDTGQMHRQKADEAYLIGRGLAPVQAYLHIPDIIKVAKENNVDAVHPGYGFLSERADFAQACQDAGVRFIGPSPEVVRKMGDKVEARAIAIAAGVPVVPGTDAPITSLHEAHEFSNTYGFPIIFKAAYGGGGRGMRVVHSYEELEENYTRAYSEALAAFGNGALFVEKFIEKPRHIEVQILGDQYGNILHLYERDCSIQRRHQKVVEIAPAAHLDPQLRTRLTSDSVKLAKQVGYENAGTVEFLVDRHGKHYFIEVNSRLQVEHTVTEEITDVDLVHAQIHVAEGRSLPDLGLRQENIRINGCAIQCRVTTEDPARSFQPDTGRIEVFRSGEGMGIRLDNASAFQGAVISPHYDSLLVKVIAHGKDHPTAATKMSRALAEFRVRGVKTNIAFLQNVLNNQQFLAGTVDTQFIDENPELFQLRPAQNRAQKLLHYLGHVMVNGPTTPIPVKASPSPTDPVVPAVPIGPPPAGFRDILLREGPEGFARAVRNHPGLLLMDTTFRDAHQSLLATRVRTHDLKKIAPYVAHNFSKLFSMENWGGATFDVAMRFLYECPWRRLQELRELIPNIPFQMLLRGANAVGYTNYPDNVVFKFCEVAKENGMDVFRVFDSLNYLPNMLLGMEAAGSAGGVVEAAISYTGDVADPSRTKYSLQYYMGLAEELVRAGTHILCIKDMAGLLKPTACTMLVSSLRDRFPDLPLHIHTHDTSGAGVAAMLACAQAGADVVDVAADSMSGMTSQPSMGALVACTRGTPLDTEVPMERVFDYSEYWEGARGLYAAFDCTATMKSGNSDVYENEIPGGQYTNLHFQAHSMGLGSKFKEVKKAYVEANQMLGDLIKVTPSSKIVGDLAQFMVQNGLSRAEAEAQAEELSFPRSVVEFLQGYIGVPHGGFPEPFRSKVLKDLPRVEGRPGASLPPLDLQALEKELVDRHGEEVTPEDVLSAAMYPDVFAHFKDFTATFGPLDSLNTRLFLQGPKIAEEFEVELERGKTLHIKALAVSDLNRAGQRQVFFELNGQLRSILVKDTQAMKEMHFHPKALKDVKGQIGAPMPGKVIDIKVVAGAKVAKGQPLCVLSAMKMETVVTSPMEGTVRKVHVTKDMTLEGDDLILEIE

SEQ ID NO: 228 - protein, 375 aa, Homo sapiens
LIGLIVEEGEDWKHVEIPKDVGPPPPVSKPSEPRPSPEPQISIPVKKEHIPGTLRFRLSPAARNILEKHSLDASQGTATGPRGIFTKEDALKLVQLKQTGKITESRPTPAPTATPTAPSPLQATAGPSYPRPVIPPVSTPGQPNAVGTFTEIPASNIRRVIAKRLTESKSTVPHAYATADCDLGAVLKVRQDLVKDDIKVSVNDFIIKAAAVTLKQMPDVNVSWDGEGPKQLPFIDISVAVATDKGLLTPIIKDAAAKGIQEIADSVKALSKKARDGKLLPEEYQGGSFSISNLGMFGIDEFTAVINPPQACILAVGRFRPVLKLTEDEEGNAKLQQRQLITVTMSSDSRVVDDELATRFLKSFKANLENPIRLA

SEQ ID NO: 229 - protein, 780 aa, Homo sapiens [sequence omitted]

SEQ ID NO: 230 - protein, 780 aa, Homo sapiens [sequence omitted]

SEQ ID NO: 231 - protein, 1273 aa, Homo sapiens
MPCFYLRSCGSLLPELKLEERTEFAHRIWDTLQKLGAVYDVSHYNALLKVYLQNEYKFSPTDFLAKMEEANIQPNRVTYQRLIASYCNVGDIEGASKILGFMKTKDLPVTEAVFSALVTGHARAGDMENAENILTVMRDAGIEPGPDTYLALLNAYAEKGDIDHVKQTLEKVEKFELHLMDRDLLQIIFSFSKAGYLSMSQKFWKKFTCERRYIPDAMNLILLLVTEKLEDVALQILLACPVSKEDGPSVFGSFFLQHCVTMNTPVEKLTDYCKKLKEVQMHSFPLQFTLHCALLANKTDLAKALMKAVKEEGFPIRPHYFWPLLVGRRKEKNVQGIIEILKGMQELGVHPDQETYTDYVIPCFDSVNSARAILQENGCLSDSDMFSQAGLRSEAANGNLDFVLSFLKSNTLPISLQSIRSSLLLGFRRSMNINVWSEITELLYKDGRYCQEPRGPTEAVGNFLYNLIDSMSDSEVQAKEEHLRQYFHQLEKMNVKIPENIYRGIRNLLESYHVPELIKDAHLLVERKNLDFQKTVQLTSSELESTLETLKAENQPIRDVLKQLILVLCSEENMQKALELKAKYESDMVTGGYAALINLCCRHDKVEDALNLKEEFDRLDSSAVLDTGNYLGLVRVLAKHGKLQDAIKILKEMKEKDVLIKDTTALSFFHMLNGAALRGEIETVKQLHEAIVTLGLAEPSTNISFPLVTVHLEKGDLSTALEVAIDCYEKYKVLPRIHDVLCKLVEKGETDLIQKAMDFVSQEQGEMVMLYDLFFAFLQTGNYKEAKKIIETPGIRARSARLQWFCDRCVANNQVETLEKLVELTQKLFECDRDQMYYNLLKLYKINGDWQRADAVWNKIQEENVIPREKTLRLLAEILREGNQEVPFDVPELWYEDEKHSLNSSSASTTEPDFQKDILIACRLNQKKGAYDIFLNAKEQNIVFNAETYSNLIKLLMSEDYFTQAMEVKAFAETHIKGFTLNDAANSRLIITQVRRDYLKEAVTTLKTVLDQQQTPSRLAVTRVIQALAMKGDVENIEVVQKMLNGLEDSIGLSKMVFINNIALAQIKNNNIDAAIENIENMLTSENKVIEPQYFGLAYLFRKVIEEQLEPAVEKISIMAERLANQFAIYKPVTDFFLQLVDAGKVDDARALLQRCGAIAEQTPILLLFLLRNSRKQGKASTVKSVLELIPELNEKEEAYNSLMKSYVSEKDVTSAKALYEHLTAKNTKLDDLFLKRYASLLKYAGEPVPFIEPPESFEFYAQQLRKLRENSS

SEQ ID NO: 232 - protein, 239 aa, Homo sapiens
KGLEQNIKDSFQKVTLSRYGKYGHKNLQLRKGCKSVDECKEHQGGYNGLNQCLKITTSKIFQCNKYVKVMHKFSNSNRHKIRHTENKHFRCKECDKSLCMLSRLTQHKKIHTRENFYKCEECGKTFNWSTNLSKPKKIHTGEKPYKCEVCGKAFHQSSILTKHKIIRTGEKPYKCAHCGKAFKQSSHLTRHKIIHTEEKPYKCEQCGKVFKQSPTLTKHQIIYTGEEPYKCEECGKAFN

SEQ ID NO: 233 - protein, 772 aa, Homo sapiens [sequence omitted]

SEQ ID NO: 234 - protein, 1475 aa, Homo sapiens
MSTDSNSLAREFLTDVNRLCNAVVQRVEAREEEEEETHMATLGQYLVHGRGFLLLTKLNSIIDQALTCREELLTLLLSLLPLVWKIPVQEEKATDFNLPLSADIILTKEKNSSSQRSTQEKLHLEGSALSSQVSAKVNVFRKSRRQRKITHRYSVRDARKTQLSTSDSEANSDEKGIAMNKHRRPHLLHHFLTSFPKQDHPKAKLDRLATKEQTPPDAMALENSREIIPRQGSNTDILSEPAALSVISNMNNSPFDLCHVLLSLLEKVCKFDVTLNHNSPLAASVVPTLTEFLAGFGDCCSLSDNLESRVVSAGWTEEPVALIQRMLFRTVLHLLSVDVSTAEMMPENLRKNLTELLRAALKIRICLEKQPDPFAPRQKKTLQEVQEDFVFSKYRHRALLLPELLEGVLQILICCLQSAASNPFYFSQAMDLVQEFIQHHGFNLFETAVLQMEWLVLRDGVPPEASEHLKALINSVMKIMSTVKKVKSEQLHHSMCTRKRHRRCEYSHFMHHHRDLSGLLVSAFKNQVSKNPFEETADGDVYYPERCCCIAVCAHQCLRLLQQASLSSTCVQILSGVHNIGICCCMDPKSVIIPLLHAFKLPALKNFQQHILNILNKLILDQLGGAEISPKIKKAACNICTVDSDQLAQLEETLQGNLCDAELSSSLSSPSYRFQGILPSSGSEDLLWKWDALKAYQNFVFGEDRLHSIQIANHICNLIQKGNIVVQWKLYNYIFNPVLQRGVELAHHCQHLSVTSAQSHVCSHHNQCLPQDVLQIYVKTLPILLKSRVIRDLFLSCNGVSQIIELNCLNGIRSHSLKAFETLIISLGEQQKDASVPDIDGIDIEQKELSSVHVGTSFHHQQAYSDSPQSLSKFYAGLKEAYPKRRKTVNQDVHINTINLFLCVAFLCVSKEAESDRESANDSEDTSGYDSTASEPLSHMLPCISLESLVLPSPEHMHQAADIWSMCRWIYMLSSVFQKQFYRLGGFRVCHKLIFMIIQKLFRSHKEEQGKKEGDTSVNENQDLNRISQPKRTMKEDLLSLAIKSDPIPSELGSLKKSADSLGKLELQHISSINVEEVSATEAAPEEAKLFTSQESETSLQSIRLLEALLAICLHGARTSQQKMELELPNQNLSVESILFEMRDHLSQSKVIETQLAKPLFDALLRVALGNYSADFEHNDAMTEKSHQSAEELSSQPGDFSEEAEDSQCCSFKLLVEEEGYEADSESNPEDGETQDDGVDLKSETEGFSASSSPNDLLENLTQGEIIYPEICMLELNLLSASKAKLDVLAHVFESFLKIIRQKEKNVFLLMQQGTVKNLLGGFLSILTQDDSDFQACQRVLVDLLVSLMSSRTCSEELTLLLRIFLEKSPCTKILLLGILKIIESDTTMSPSQYLTFPLLHAPNLSNGVSSQKYPGILNSKAMGLLRRARVSRSKKEADRESFPHRLLSSWDIAPVHLPLVGQNCWPHLSEGFSV

SEQ ID NO: 235 - protein, 1561 aa, Homo sapiens
IEEGSKAAAVDKLLAGDEIVGINDIGLSGFRQEAICLVKGSHKTLKLVVKRRSELGWRPHSWHATKFSDSHPELAASPFTSTSGCPSWSGRHHASSSSHDLSSSWEQTNLQRTLDHFSSLGSVDSLDHPSSRLSVAKSNSSIDHLGSHSKRDSAYGSFSTSSSTPDHTLSKADTSSAENILYTVGLWEAPRQGGRQAQAAGDPQGSEEKLSCFPPRVPGDSGKGPRPEYNAEPKLAAPGRSNFGPVWYVPDKKKAPSSPPPPPPPLRSDSFAATKSHEKAQGPVFSEAAAAQHFTALAQAQPRGDRRPELTDRPWRSAHPGSLGKGSGGPGCPQEAHADGSWPPSKDGASSRLQASLSSSDVRFPQSPHSGRHPPLYSDHSPLCADSLGQEPGAASFQNDSPPQVRGLSSCDQKLGSGWQGPRPCVQGDLQAAQLWAGCWPSDTALGALESLPPPTVGQSPRHHLPQPEGPPDARETGRCYPLDKGAEGCSAGAQEPPRASRAEKASQRLAASITWADGESSRICPQETPLLHSLTQEGKRRPESSPEDSATRPPPFDAHVGKPTRRSDRFATTLRNEIQMHRAKLQKSRSTVALTAAGEAEDGTGRWRAGLGGGTQEGPLAGTYKDHLKEAQARVLRATSFKRRDLDPNPGDLYPESLEHRMGDPDTVPHFWEAGLAQPPSSTSGGPHPPRIGGRRRFTAEQKLKSYSEPEKMNEVGLTRGYSPHQHPRTSEDTVGTFADRWKFFEETSKPVPQRPAQKQALHGIPRDKPERPRTAGRTCEGTEPWSRTTSLGDSLNAHSAAEKAGTSDLPRRLGTFAEYQASWKEQRKPLEARSSGRCHSADDILDVSLDPQERPQHVHGRSRSSPSTDHYKQEASVELRRQAGDPGEPREELPSAVRAEEGQSTPRQADAQCREGSPGSQQHPPSQKAPNPPTFSELSHCRGAPELPREGRGRAGTLPRDYRYSEESTPADLGPRAQSPGSPLHARGQDSWPVSSALLSKRPAPQRPPPPKREPRRYRATDGAPADAPVGVLGRPFPTPSPASLDVYVARLSLSHSPSVFSSAQPQDTPKATVCERGSQHVSGDASRPLPEALLPPKQQHLRLQTATMETSRSPSPQFAPQKLTDKPPLLIQDEDSTRIERVMDNNTTVKMVPIKIVHSESQPEKESRQSLACPAEPPALPHGLEKDQIKTLSTSEQFYSRFCLYTRQGAEPEAPHRAQPAEPQPLGTQVPPEKDRCTSPPGLSYMKAKEKTVEDLKSEELAREIVGKDKSLADILDPSVKIKTTMDLMEGIFPKDEHLLEEAQQRRKLLPKIPSPRSTEERKEEPSVPAAVSLATNSTYYSTSAPKAELLIKMKDLQEQQEHEEDSGSDLDHDLSVKKQELIESISRKLQVLREARESLLEDVQANTVLGAEVEAIVKGVCKPSEFDKFRMFIGDLDKVVNLLLSLSGRLARVENALNNLDDGASPGDRQSLLEKQRVLIQQHEDAKELKENLDRRERIVFDILANYLSEESLADYEHFVKMKSALIIEQRELEDKIHLGEEQLKCLLDSLQPERGK

SEQ ID NO: 236 - protein, 461 aa, Homo sapiens [sequence omitted]

SEQ ID NO: 237 - protein, 1411 aa, Homo sapiens [sequence omitted]

SEQ ID NO: 238 - protein, 2477 aa, Homo sapiens [sequence omitted]

SEQ ID NO: 239 - protein, 133 aa, Homo sapiens [sequence omitted]

SEQ ID NO: 240 - protein, 233 aa, Homo sapiens
MLLLVTSLLLCELPHPAFLLIPEKSDLRTVAPASSLNVRFDSRTMNLSWDCQENTTFSKCFLTDKKNRVVEPRLSNNECSCTFREICLHEGVTFEVHVNTSQRGFQQKLLYPNSGREGTAAQNFSCFIYNADLMNCTWARGPTAPRDVQYFLYIRNSKRRREIRCPYYIQDSGTHVGCHLDNLSGLTSRNYFLVNGTSREIGIQFFDSLLDTKKIGSLGYSGCSRQFHRSKTN

SEQ ID NO: 241 - protein, 333 aa, Homo sapiens
RRRRSVQWCAVSQPEATKCFQWQRNMRRVRGPPVSCIKRDSPIQCIQAIAENRADAVTLDGGFIYEAGLAPYKLRPVAAEVYGTERQPRTHYYAVAVVKKGGSFQLNELQGLKSCHTGLRRTAGWNVPIGTLRPFLNWTGPPEPIEAAVARFFSASCVPGADKGQFPNLCRLCAGTGENKCAFSSQEPYFSYSGAFKCLRDGAGDVAFIRESTVFEDLSDEAERDEYELLCPDNTRKPVDKFKDCHLARVPSMAVVARSVNGKEDAIWNLLRQAQEKFGKDKSPKFQLFGSPSGQKDLLFKDSAIGFSRVPPRIDSGLYLGSGYFTAINLRKS

SEQ ID NO: 242 - protein, 139 aa, Homo sapiens [sequence omitted]

SEQ ID NO: 243 - protein, 390 aa, Homo sapiens [sequence omitted]

SEQ ID NO: 244 - protein, 263 aa, Homo sapiens
MLLAWVQAFLVSNMLLAEAYGSGGCFWDNGHLYREDQTSPAPGLRCLNWLDAQSGLASAPVSGAGNHSYCRNPDEDPRGPWCYVSGEAGVPEKRPCEDLRCPETTSQALPAFTTEIQEASEGPGADEVQVFAPANALPARSEAAAVQPVIGISQRVRMNSKEKKDLGTLGYVLGITMMVIIIAIGAGIILGYSYKRGKDLKEQHDQKVCEREMQRITLPLSAFTNPTCEIVDEKTVVVHTSQTPVDPQEGTTPLMGQAGTPGA

SEQ ID NO: 245 - protein, 741 aa, Homo sapiens [sequence omitted]

SEQ ID NO: 246 - protein, 449 aa, Homo sapiens
MEFFISMSETIKYNDDDHKTLFLKTLNEQRLEGEFCDIAIVVEDVKFRAHRCVLAACSTYFKKLFKKLEVDSSSVIEIDFLRSDIFEEVLNYMYTAKISVKKEDVNLMMSSGQILGIRFLDKLCSQKRDVSSPDENNGQSKSKYCLKINRPIGDAADTQDDDVEEIGDQDDSPSDDTVEGTPPSQEDGKSPTTTLRVQEAILKELGSEEVRKVNCYGQEVESMETPESKDLGSQTPQALTFNDGMSEVKDEQTPGWTTAASDMKFEYLLYGHHREQIACQACGKTFSDEGRLRKHEKLHTADRPFVCEMCTKGFTTQAHLKEHLKIHTGYKPYSCEVCGKSFIRAPDLKKHERVHSNERPFACHMCDKAFKHKSHLKDHERRHRGEKPFVCGSCTKAFAKASDLKRHENNMHSERKQVTPSAIQSETEQLQAAAMAAEAEQQLETIACS

SEQ ID NO: 247 - protein, 256 aa, Homo sapiens
MAVMAPRTLVLLLSGALALTQTWAGSHSMRYFFTSVSRPGRGEPRFIAVGYVDDTQFVRFDSDAASQRMEPRAPWIEQEGPEYWDGETRKVKAHSQTHRVDLGTLRGYYNQSEAGSHTLQMMFGCDVGSDWRFLRGYHQYAYDGKDYIALKEDLRSWTAADMAAQTTKHKWEAAHVAEQLRAYLEGTCVEWLRRYLENGKETLQRTDAPKTHMTHHAVSDHEATLRCWALSFYPAEITLTWQRDGEDQTQDTELVE

SEQ ID NO: 248 - protein, 482 aa, Homo sapiens
MAAVRMLRTWSRNAGKLICVRYFQTCGNVHVLKPNYVCFFGYPSFKYSHPHHFLKTTAALRGQVVQFKLSDIGEGIREVTVKEWYVKEGDTVSQFDSICEVQSDKASVTITSRYDGVIKKLYYNLDDIAYVGKPLVDIETEALKDSEEDVVETPAVSHDEHTHQEIKGRKTLATPAVRRLAMENNIKLSEVVGSGKDGRILKEDILNYLEKQTGAILPPSPKVEIMPPPPKPKDMTVPILVSKPPVFTGKDKTEPIKGFQKAMVKTMSAALKIPHFGYCDEIDLTELVKLREELKPIAFARGIKLSFMPFFLKAASLGLLPFPILNASVDENCQNITYKASHNIGIAMDTEQGVIVPNVKNVQICSIFDIATELNRLQKLGSVGQLSTTDLTGGTFTLSNIGSIGGTFAKPVIMPPEVAIGALGSIKAIPRFNQKGEVYKAQIMNVSWSADHRVIDGATMSRFSNLWKSYLENPAFMLLDLK

SEQ ID NO: 249 - protein, 531 aa, Homo sapiens
MSKPHSEAGTAFIQTQQLHAAMADTFLEHMCRLDIDSPPITARNTGIICTIGPASRSVETLKEMIKSGMNVARLNFSHGTHEYHAETIKNVRTATESFASDPILYRPVAVALDTKGPEIRTGLIKGSGTAEVELKKGATLKITLDNAYMEKCDENILWLDYKNICKVVEVGSKIYVDDGLISLQVKQKGADFLVTEVENGGSLGSKKGVNLPGAAVDLPAVSEKDIQDLKFGVEQDVDMVFASFIRKASDVHEVRKVLGEKGKNIKIISKIENHEGVRRFDEILEASDGIMVARGDLGIEIPAEKVFLAQKMMIGRCNRAGKPVICATQMLESMIKKPPPTRAEGSDVANAVLDGADCIMLSGETAKGDYPLEAVRMQHLIAREAEAAMFHRKLFEELVRASSHSTDLMEAMAMGSVEASYKCLAAALIVLTESGRSAHQVARYRPRAPIIAVTRNPQTARQAHLYRGIFPVLCKDPVQEAWAEDVDLRVNFAMNVGKARGFFKKGDVVIVLTGWRPGSGFTNTMRVVPVP

SEQ ID NO: 250 - protein, 659 aa, Homo sapiens [sequence omitted]

SEQ ID NO: 251 - protein, 59 aa, Homo sapiens
MSETAPAETATPAPVEKSPAKKKATKKAAGAGAAKRIAAGPPVSELITKAVPASKERNA

SEQ ID NO: 252 - protein, 342 aa, Homo sapiens
IGKEIIDLVLDRIRKLADQCTRLQGFLVFHSFGGGTGSGFTSLLMERLSVDYGKKSKLEFSIYPAPQVSTAVVEPYNSILTTHTTLEHSDCAFMVDNEAIYDICRRNLDIERPTYTNLNRLIGQIVSSITASLRFDGALNVDLTEFQTNLVPYPRIHFPLATYAPVISAEKAYHEQLSVADITNACFEPANQMVKCDPGHGKYMACCLLYRGDVVPKDVNAAIATIKTKRTIQFVDWCPTGFKVGINYQPPTVVPGGDLAKVQRAVCMLSNTTAIAEAWARLDHKFDLMYAKRAFVHWYVGEGMEEGEFSEAREDMAALEKDYEEVGVDSVEGEGEEEGEEY

SEQ ID NO: 253 - protein, 267 aa, Homo sapiens
MKAAVLTLAVLFLTGSQARHFWQQDEPPQSPWDRVKDLATVYVDVLKDSGRDYVSQFEGSALGKQLNLKLLDNWDSVTSTFSKLREQLGPVTQEFWDNLEKETEGLRQEMSKDLEEVKAKVQPYLDDFQKKWQEEMELYRQKVDPLRAELQEGARQKLHELQEKLSPLGEEMRDRARAHVDALRTHLAPYSDELRQRLAARLEALKENGGARLAEYHAKATEHLSTLSEKAKPALEDLRQGLLPVLESFKVSFLSALEEYTKKLNTQ

SEQ ID NO: 254 - protein, 3225 aa, Homo sapiens [sequence omitted]

SEQ ID NO: 255 - protein, 640 aa, Homo sapiens [sequence omitted]

SEQ ID NO: 256 - protein, 452 aa, Homo sapiens
MTTMAAATLLRATPHFSGLAAGRTFLLQGLLRLLKAPALPLLCRGLAVEAKKTYVRDKPHVNVGTIGHVDHGKTTLTAAITKILAEGGGAKFKKYEEIDNAPEERARGITINAAHVEYSTAARHYAHTDCPGHADYVKNMITGTAPLDGCILVVAANDGPMPQTREHLLLARQIGVEHVVVYVNKADAVQDSEMVELEIRELLTEFGYKGEETPVIVGSALCALEGRDPELGLKSVQKLLDAVDTYIPVPARDLEKPFLLPVEAVYSVPGRGTVVTGTLERGILKKGDECELLGHSKNIRTVVTGIEMFHKSLERAEAGDNLGALVRGLKREDLRRGLVMVKPGSIKPHQKVEAQVYILSKEEGGRHKPFVSHFMPVMFSLTWDMACRIILPPEKELAMPGEDLKFNLILRQPMILEKGQRFTLRDGNRTIGTGLVTNTLAMTEEEKNIKWG

SEQ ID NO: 257 - protein, 1300 aa, Homo sapiens
MEFYESAYFIVLIPSIVITVIFLFFWLFMKETLYDEVLAKQKREQKLIPTKTDKKKAEKKKNKKKEIQNGNLHESDSESVPRDFKLSDALAVEDDQVAPVPLNVVETSSSVRERKKKEKKQKPVLEEQVIKESDASKIPGKKVEPVPVTKQPTPPSEAAASKKKPGQKKSKNGSDDQDKKVETLMVPSKRQEALPLHQETKQESGSGKKKASSKKQKTENVFVDEPLIHATTYIPLMDNADSSPVVDKREVIDLLKPDQVEGIQKSGTKKLKTETDKENAEVKFKDFLLSLKTMMFSEDEALCVVDLLKEKSGVIQDALKKSSKGELTTLIHQLQEKDKLLAAVKEDAAATKDRCKQLTQEMMTEKERSNVVITRMKDRIGTLEKEHNVFQNKIHVSYQETQQMQMKFQQVREQMEAEIAHLKQENGILRDAVSNTTNQLESKQSAELNKLRQDYARLVNELTEKTGKLQQEEVQKKNAEQAATQLKVQLQEAERRWEEVQSYIRKRTAEHEAAQQDLQSKFVAKENEVQSLHSKLTDTLVSKQQLEQRLMQLMESEQKRVNKEESLQMQVQDILEQNEALKAQIQQFHSQIAAQTSASVLAEELHKVIAEKDKQIKQTEDSLASERDRLTSKEEELKDIQNMNFLLKAEVQKLQALANEQAAAAHELEKMQQSVYVKDDKIRLLEEQLQHEISNKMEEFKILNDQNKALKSEVQKLQTLVSEQPNKDVVEQMEKCIQEKDEKLKTVEELLETGLIQVATKEEELNAIRTENSSLTKEVQDLKAKQNDQVSFASLVEELKKVIHEKDGKIKSVEELLEAELLKVANKEKTVQDLKQEIKALKEEIGNVQLEKAQQLSITSKVQELQNLLKGKEEQMNTMKAVLEEKEKDLANTGKWLQDLQEENESLKAHVQEVAQHNLKEASSASQFEELEIVLKEKENELKRLEAMLKERESDLSSKTQLLQDVQDENKLFKSQIEQLKQQNYQQASSFPPHEELLKVISEREKEISGLWNELDSLKDAVEHQRKKNNERQQQVEAVELEAKEVLKKLFPKVSVPSNLSYGEWLHGFEKKAKECMAGTSGSEEVKVLEHKLKEADEMHTLLQLECEKYKSVLAETEGILQKLQRSVEQEENKWKVKVDESHKTIKQMQSSFTSSEQELERLRSENKDIENLRREREHLEMELEKAEMERSTYVTEVRELKAQLNETLTKLRTEQNERQKVAGDLHKAQQSLELIQSKIVKAAGDTTVIENSDVSPETESSEKETMSVSLNQTVTQLQQLLQAVNQQLTKEKEHYQVLE

SEQ ID NO: 258 - protein, 199 aa, Homo sapiens [sequence omitted]

SEQ ID NO: 259 - protein, 438 aa, Homo sapiens [sequence omitted]

SEQ ID NO: 260 - protein, 140 aa, Homo sapiens
NRPTSISWDGLDSGKLYTLVLTDPDAPSRKDPKYREWHHFLVVNMKGNDISSGTVLSDYVGSGPPKGTGLHRYVWLVYEQDRPLKCDEPILSNRSGDHRGKFKVASFRKKYELRAPVAGTCYQAEWDDYVPKLYEQLSGK

SEQ ID NO: 261 - protein, 886 aa, Homo sapiens
MEPPTVPSERSLSLSLPGPREGQATLKPPPQHLWRQPRTPIRIQQRGYSDSAERAERERQPHRPIERADAMDTSDRPGLRTTRMSWPSSFHGTGTGSGGAGGGSSRRFEAENGPTPSPGRSPLDSQASPGLVLHAGAATSQRRESFLYRSDSDYDMSPKTMSRNSSVTSEAHAEDLIVTPFAQVLASLRSVRSNFSLLTNVPVPSNKRSPLGGPTPVCKATLSEETCQQLARETLEELDWCLEQLETMQTYRSVSEMASHKFKRMLNRELTHLSEMSRSGNQVSEYISTTFLDKQNEVEIPSPTMKEREKQQAPRPRPSQPPPPPVPHLQPMSQITGLKKLMHSNSLNNSNIPRFGVKTDQEELLAQELENLNKWGLNIFCVSDYAGGRSLTCIMYMIFQERDLLKKFRIPVDTMVTYMLTLEDHYHADVAYHNSLHAADVLQSTHVLLATPALDAVFTDLEILAALFAAAIHDVDHPGVSNQFLINTNSELALMYNDESVLENHHLAVGFKLLQEDNCDIFQNLSKRQRQSLRKMVIDMVLATDMSKHMTLLADLKTMVETKKVTSSGVLLLDNYSDRIQVLRNMVHCADLSNPTKPLELYRQWTDRIMAEFFQQGDRERERGMEISPMCDKHTASVEKSQVGFIDYIVHPLWETWADLVHPDAQEILDTLEDNRDWYYSAIRQSPSPPPEEESRGPGHPPLPDKFQFELTLEEEEEEEISMAQIPCTAQEALTAQGLSGVEEALDATIAWEASPAQESLEVMAQEASLEAELEAVYLTQQAQSTGSAPVAPDEFSSREEFVVAVSHSSPSALALQSPLLPAWRTLSVSEHAPGLPGLPSTAAEVEAQREHQAAKRACSACAGTFGEDTSALPAPGGGGSGGDPT

SEQ ID NO: 262 - protein, 323 aa, Homo sapiens
RKVGAALAAGCTVVVKPAEDTPFSALALAELASQAGIPSGVYNVIPCSRKNAKEVGEAICTDPLVSKISFTGSTTTGKILLHHAANSVKRVSMELGGLAPFIVFDSANVDQAVAGAMASKFRNTGQTCVCSNQFLVQRGIHDAFVKAFAEAMKKNLRVGNGFEEGTTQGPLINEKAVEKVEKQVNDAVSKGATVVTGGKRHQLGKNFFEPTLLCNVTQDMLCTHEETFGPLAPVIKFDTEEEAIAIANAADVGLAGYFYSQDPAQIWRVAEQLEVGMVGVNEGLISSVECPFGGVKQSGLGREGSKYGIDEYLELKYVCYGGL

SEQ ID NO: 263 - protein, 1972 aa, Homo sapiens
MGDDSEWLKLPVDQKCEHKLWKARLSGYEEALKIFQKIKDEKSPEWSKFLGLIKKFVTDSNAVVQLKGLEAALVYVENAHVAGKTTGEVVSGVVSKVFNQPKAKAKELGIEICLMYIEIEKGEAVQEELLKGLDNKNPKIIVACIETLRKALSEFGSKIILLKPIIKVLPKLFESREKAVRDEAKLIAVEIYRWIRDALRPPLQNINSVQLKELEEEWVKLPTSAPRPTRFLRSQQELEAKLEQQQSAGGDAEGGGDDGDEVPQIDAYELLEAVEILSKLPKDFYDKIEAKKWQERKEALESVEVLIKNPKLEAGDYADLVKALKKVVGKDTNVMLVALAAKCLTGLAVGLRKKFGQYAGHVVPTILEKFKEKKPQVVQALQEAIDAIFLTTTLQNISEDVLAVMDNKNPTIKQQTSLFIARSFRHCTASTLPKSLLKPFCAALLKHINDSAPEVRDAAFEALGTALKVVGEKAVKPFLADVDKLKLDKIKECSEKVELIHGKKAGLAADKKEFKPLPGRTAASGAAGDKDTKDISAPKPGPLKKAPAAKAGGPPKKGKPAAPGGAGNTGTKNKKGLETKEIVEPELSIEVCEEKASAVLPPTCIQLLDSSNWKERLACMEEFQKAVELMDRTEMPCQALVRMLAKKPGWKETNFQVMQMKLHIVALIAQKGNFSKTSAQVVLDGLVDKIGDVKCGNNAKEAMTAIAEACMLPWTAEQVVSMAFSQKNPKNQSETLNWLSNAIKEFGFSGLNVKAFISNVKTALAATNPAVRTAAITLLGVMYLYVGPSLRMFFEDEKPALLSQIDAEFEKMQGQSPPAPTRGISKHSTSGTDEGEDGDEPDDGSNDVVDLLPRTEISDKITSELVSKIGDKNWKIRKEGLDEVAGIINDAKFIQPNIGELPTALKGRLNDSNKILVQQTLNILQQLAVAMGPNIKQHVKNLGIPIITVLGDSKNNVRAAALATVNAWAEQTGMKEWLEGEDLSEELKKENPFLRQELLGWLAEKLPTLRSTPTDLILCVPHLYSCLEDRNGDVRKKAQDALPFFMMHLGYEKMAKATGKLKPTSKDQVLAMLEKAKVNMPAKPAPPTKATSKPMGGSAPAKFQPASAPAEDCISSSTEPKPDPKKAKAPGLSSKAKSAQGKKMPSKTSLKEDEDKSGPIFIVVPNGKEQRMKDEKGLKVLKWNFTTPRDEYIEQLKTQMSSCVAKWLQDEMFHSDFQHHNKALAVMVDHLESEKEGVIGCLDLILKWLTLRFFDTNTSVLMKALEYLKLLFTLLSEEEYHLTENEASSFIPYLVVKVGEPKDVIRKDVRAILNRMCLVYPASKMFPFIMEGTKSKNSKQRAECLEELGCLVESYGMNVCQPTPGKALKEIAVHIGDRDNAVRNAALNTIVTVYNVHGDQVFKLIGNLSEKDMSMLEERIKRSAKRPSAAPIKQVEEKPQRAQNISSNANMLRKGPAEDMSSKLNQARSMSGHPEAAQMVRREFQLDLDEIENDNGTVRCEMPELVQHKLDDIFEPVLIPEPKIRAVSPHFDDMHSNTASTINFIISQVASGDINTSIQALTQLFQIESLAREASTGVLKDLMHGLITLMLDSRIEDLEEGQQVIRSVNLLVVKVLEKSDQTNILSALLVLLQDSLLATASSPKFSELVMKCLWRMVRLLPDTINSINLDRILLDIHIFMKVFPKEKLKQCKSEFPIRTLKTLLHTLCKLKGPKILDHLTMIDNKNESELEAHLCRMMKHSMDQTGSKSDKETAKGASRIDAKSSKAKVNDFLAEIFKKIGSKENTKEGLAELYEYKKKYSDADIEPFLKNSSQFFQSYVERGLRVIEMEREGKGRISTSTGISPQMEVTCVPTPTSTVSSIGNTNGEEVGPSVYLERLKILRQRCGLDNTKQDDRPPLTSLLSKPAVPTVASSTDMLHSKLSQLRESREQHQHSDLDSNQTHSSGTVTSSSSTANIDDLKKRLERIKSSRK

SEQ ID NO: 264 - protein, 359 aa, Homo sapiens
MAAVSGLVRRPLREVSGLLKRRFHWTAPAALQVTVRDAINQGMDEELERDEKVFLLGEEVAQYDGAYKVSRGLWKKYGDKRIIDTPISEMGFAGIAVGAAMAGLRPICEFMTFNFSMQAIDQVINSAAKTYYMSGGLQPVPIVFRGPNGASAGVAAQHSQCFAAWYGHCPGLKVVSPWNSEDAKGLIKSAIRDNNPVVVLENELMYGVPFEFPPEAQSKDFLIPIGKAKIERQGTHITVVSHSRPVGHCLEAAAVLSKEGVECEVINMRTIRPMDMETIEASVMKTNHLVTVEGGWPQFGVGAEICARIMEGPAFNFLDAPAVRVTGADVPMPYAKILEDNSIPQVKDIIFAIKKTLNI

SEQ ID NO: 265 - protein, 171 aa, Homo sapiens
MGGRSSPNQGSWRGTRRASPDWGLCWRRGRGPRVPAPGRAVPVTLPKRLHRGARAQPRGAGRDHHVQGPHGAAEGGGTPELHVPIRPPRPSCPGHRPPAGSIPQPCRAPGPEAAALHGGTAAARGPWVAPGASGATAVGPAHGQVQGVLGGGRTPRLRQPLHPSLPAASEL

SEQ ID NO: 266 - protein, 476 aa, Homo sapiens
EEKSEDQDLQGLKDKPLKFKKVKKDKKEEKEGKHEPVQPSAHHSAEPAEAGKAETSEGSGSARLCEASASPKQRRSIIRDRGPMYDDPTLPEGWTRKLKQRKSGRSAGKYDVYLINPQGKAFRSKVELIAYFEKVGDTSLDPNDFDFTVTGRGSPSRREQKPPKKPKSPKAPGTGRGRGRPKGSGTTRPKAATSEGVQVKRVLEKSPGKLLVKMPFQTSPGGKAEGGGATTSTQVMVIKRPGRKRKAEADPQAIPKKRGRKPGSVVAAAAAEAKKKAVKESSIRSVQETVLPIKKRKTRETVSIEVKEVVKPLLVSTLGEKSGKGLKTCKSPGRKSKESSPKGRSSSASSPPKKEHHHHHHHSESPKAPVPLLPPLPPPPPEPESSEDPTSPPEPQDLSSSVCKEEKMPRGGSLESDGCPKEPAKTQPAVATAATAAEKYKHRGEGERKDIVSSSMPRPNREEPVDSRTPVTERVS

SEQ ID NO: 267 - protein, 787 aa, Homo sapiens
MSVQSSSGSLEGPPSWSQLSTSPTPGSAAAARSLLNHTPPSGRPREGAMDELHSLDPRRQELLEARFTGVASGSTGSTGSCSVGAKASTNNESSNHSFGSLESLSDKESETPEKKQSESSRGRKRKAENQNESSQGFPNLPVFQSLAYWEMGRTAGGKSIGGRGHKISDYFEYQGGNGSSPVRGIPPAIRSPQNSHSHSTPSSSVRPNSPSPTALAFGDHPIVQPKQLSFKIIQTDLTMLKLAALESNKILDLEKKEGRIDDLLRANCDLRRQIDEQQKLLDKYKERLNKCISMSKKLLIEKSTQEKLSSREKSMQDRLRLGHFTTVRHGASFTEQWTDGFAFQNLVKQQEWVNQQREDIERQRKLLAKRKPPTANNSQAPSTNSEPKQRKNKAVNGAENDPFVRPNLPQLLTLAEYHEQEEIFKLRLGHLKKEEAGIQAELERLERVRNLHIRELKRIHNEDNSQFKDHPTLNERYLLLHLLGRGGFSEVDKAFDLSEQRYAAVKIHQLNKSWRDEKKENYHKHACREYRIHKELDHPRIVKLYDYFSLDTDTFCTVLEYCEGNDLDFYLKQHKLMSEKEARSIVMQIVNALRYLNEIKPPIIHYDLKPGNILLVDGTACGEIKITDFGLSKIMDDDSYGVDGMVLTSQGAGTYWYLPPECFVVGKEPPKISNKVDVWSVGVIFYQCLYGRKPFGHNQSQQDILQENTILKATEVQFPVKPVVSSEAKAFIRRCLAYRKEDRFDVHQLACDPYLLPHMRRSNSSGNLHMAGLTASPTPPSSSIITY

SEQ ID NO: 268 - protein, 949 aa, Homo sapiens
GSQAQEPILVSAKTMLESSSYLIRTARSLAINPKDPPTWSVLAGHSHTVSDSIKSLITSIRDKAPGQRECDYSIDGINRCIRDIEQASLAAVSQSLATRDDISVEALQEQLTSVVQEIGHLIDPIATAARGEAAQLGHKVTQLASYFEPLILAAVGVASKILDHQQQMTVLDQTKTLAESALQMLYAAKEGGGNPKAQHTHDAITEAAQLMKEAVDDIMVTLNEAASEVGLVGGMVDAIAEAMSKLDEGTPPEPKGTFVDYQTTVVKYSKAIAVTAQEMMTKSVTNPEELGGLASQMTSDYGHLAFQGQMAAATAEPEEIGFQIRTRVQDLGHGCIFLVQKAGALQVCPTDSYTKRELIECARAVTEKVSLVLSALQAGNKGTQACITAATAVSGIIADLDTTIMFATAGTLNAENSETFADHRENILKTAKALVEDTKLLVSGAASTPDKLAQAAQSSAATITQLAEVVKLGAASLGSDDPETQVVLINAIKDVAKALSDLISATKGAASKPVDDPSMYQLKGAAKVMVTNVTSLLKTVKAVEDEATRGTRALEATIECIKQELTVFQSKDVPEKTSSPEESIRMTKGITMATAKAVAAGNSCRQEDVIATANLSRKAVSDMLTACKQASFHPDVSDEVRTRALRFGTECTLGYLDLLEHVLVILQKPTPEFKQQLAAFSKRVAGAVTELIQAAEAMKGTEWVDPEDPTVIAETELLGAAASIEAAAKKLEQLKPRAKPKQADETLDFEEQILEAAKSIAAATSALVKSASAAQRELVAQGKVGSIPANAADDGQWSQGLISAARMVAAATSSLCEAANASVQGHASEEKLISSAKQVAASTAQLLVACKVKADQDSEAMRRLQAAGNAVKRASDNLVRAAQKAAFGKADDDDVVVKTKFVGGIAQIIAAQEEMLKKERELEEARKKLAQIRQQQYKFLPTELREDEG

SEQ ID NO: 269 - protein, 1542 aa, Homo sapiens
RLNSSLERRGRRIDHVLLNADGIRGFPVVLQQISKSLNYLLMSASQTKSESVEEKGGGPPRCSITELLQMCWPSLSEDCVASHTTLSQQLDQVLQSLREALELPEPRTPPLSSLVEQAAQKAPEAEAHPVQIQTQLLQKNLGKQTPSGSRQMDYLGTFFSYCSTLAAVLLQSLSSEPDHVEVKVGNPFVLLQQSSSQLVSHLLFERQVPPERLAALLAQENLSLSVPQVIVSCCCEPLALCSSRQSQQTSSLLTRLGTLAQLHASHCLDDLPLSTPSSPRTTENPTLERKPYSSPRDSSLPALTSSALAFLKSRSKLLATVACLGASPRLKVSKPSLSWKELRGRREVPLAAEQVARECERLLEQFPLFEAFLLAAWEPLRGSLQQGQSLAVNLCGWASLSTVLLGLHSPIALDVLSEAFEESLVARDWSRALQLTEVYGRDVDDLSSIKDAVLSCAVAYDKEGWQYLFPVKDASLRSRLALQFVDRWPLESCLEILAYCISDTAVQEGLKCELQRKLAELQVYQKILGLQSPPVWCDWQTLRSCCVEDPSTVMNMILEAQEYELCEEWGCLYPIPREHLISLHQKHLLHLLERRDHDKALQLLRRIPDPTMCLEVTEQSLDQHTSLATSHFLANYLTTHFYGQLTAVRHREIQALYVGSKILLTLPEQHRASYSHLSSNPLFMLEQLLMNMKVDWATVAVQTLQQLLVGQEIGFTMDEVDSLLSRYAEKALDFPYPQREKRSDSVIHLQEIVHQAADPETLPRSPSAEFSPAAPPGISSIHSPSLRERSFPPTQPSQEFVPPATPPARHQWVPDETESICMVCCREHFTMFNRRHHCRRCGRLVCSSCSTKKMVVEGCRENPARVCDQCYSYCNKDVPEEPSEKPEALDSSKSESPPYSFVVRVPKADEVEWILDLKEEENELVRSEFYYEQAPSASLCIAILNLHRDSIACGHQLIEHCCRLSKGLTNPEVDAGLLTDIMKQLLFSAKMMFVKAGQSQDLALCDSYISKVDVLNILVAAAYRHVPSLDQILQPAAVTRLRNQLLEAEYYQLGVEVSTKTGLDTTGAWHAWGMACLKAGNLTAAREKFSRCLKPPFDLNQLNHGSRLVQDVVEYLESTVRPFVSLQDDDYFATLRELEATLRTQSLSLAVIPEGKIMNNTYYQECLFYLHNYSTNLAIISFYVRHSCLREALLHLLNKESPPEVFIEGIFQPSYKSGKLHTLENLLESIDPTLESWGKYLIAACQHLQKKNYYHILYELQQFMKDQVRAAMTCIRFFSHKAKSYTELGEKLSWLLKAKDHLKIYLQETSRSSGRKKTTFFRKKMTAADVSRHMNTLQLQMEVTRFLHRCESAGTSQITTLPLPTLFGNNHMKMDVACKVMLGGKNVEDGFGIAFRVLQDFQLDAAMTYCRAARQLVEKEKYSEIQQLLKCVSESGMAAKSDGDTILLNCLEAFKRIPPQELEGLIQAIHNDDNKVRAYLICCKLRSAYLIAVKQEHSRATALVQQVQQAAKSSGDAVVQDICAQWLLTSHPRGAHGPGSRK

SEQ ID NO: 270 - protein, 1053 aa, Homo sapiens
GAQLLGVHPKGESQRASRGGGQATKMSSAVGPRGPRPPTVPPPMQELPDLSHLTEEERNIIMAVMDRQKEEEEKEEAMLKCVVRDMAKPAACKTPRNAENQPHQPSPRLHQQFESYKEQVRKIGEEARRYQGEHKDDAPTCGICHKTKFADGCGHLCSYCRTKFCARCGGRVSLRSNNEDKVVMWVCNLCRKQQEILTKSGAWFFGSGPQQTSQDGTLSDTATGAGSEVPREKKARLQERSRSQTPLSTAAASSQDAAPPSAPPDRSKGAEPSQQALGPEQKQASSRSRSEPPRERKKTPGLSEQNGKGALKSERKRVPKTSAQPVEGAVEERERKERRESRRLEKGRSQDYPDTPEKRDEGKAADEEKQRKEEDYQTRYRSDPNLARYPVKPPPEEQQMRMHARVSRARHERRHSDVALPRTEAGAALPEGKAGKRAPAAARASPPDSPRAYSAERTAETRAPGAKQLTNHSPPAPRHGPVPAEAPELKAQEPLRKQSRLDPSSAVLMLRNDSLSSDQSESVRPSPPKPHRSKRGGKKRQMSVSSSEEEGVSTPEYTSCEDVELESESVSEKGDLDYYWLDPATWHSRETSPISSHPVTWQPSKEGDRLIGRVILNKRTTMPKDSGALLGLKVVGGKMTDLGRLGAFITKVKKGSLADVVGHLRAGDEVLEWNGKPLPGATNEEVYNIILESKSEPQVEIIVSRPIGDIPRIPESSHPPLESSSSSFESQKMERPSISVISPTSPGALKDAPQVLPGQLSVKLWYDKVGHQLIVNVLQATDLPARVDGRPRNPYVKMYFLPDRSDKSKRRTKTVKKILEPKWNQTFVYSHVHRRDFRERMLEITVWDQPRVQEEESEFLGEILIELETALLDDEPHWYKLQTHDESSLPLPQPSPFMPRRHIHGESSSKKLQRSQRISDSDISDYEVDDGIGVVPPVGYRSSARESKSTTLTVPEQQRTTHHRSRSVSPHRGNDQGKPRSRLPNVPLQRSLDEIHPTRRSRSPTRHHDASRSPVDHRTRDVDSQYLSEQDSELLMLPRAKRGRSAECLHTTR

SEQ ID NO: 271 - protein, 1371 aa, Homo sapiens
AASASSTNLIHLSSKGHISPAKDTSLQQRTPAEMSPVLHFYVRPSGHEGAASGHTRRKLQGKLPELQGVETELCYNVNWTAEALPSAEETKKLMWLFGCPLLLDDVARESWLLPGSNDLLLEVGPRLNFSTPTSTNIVSVCRATGLGPVDRVETTRRYRLSFAHPPSAEVEAIALATLHDRMTEQHFPHPIQSFSPESMPEPLNGPINILGEGRLALEKANQELGLALDSWDLDFYTKRFQELQRNPSTVEAFDLAQSNSEHSRHWFFKGQLHVDGQKLVHSLFESIMSTQESSNPNNVLKFCDNSSAIQGKEVRFLRPEDPTRPSRFQQQQGLRHVVFTAETHNFPTGVCPFSGATTGTGGRIRDVQCTGRGAHVVAGTAGYCFGNLHIPGYNLPWEDLSFQYPGNFARPLEVAIEASNGASDYGNKFGEPVLAGFARSLGLQLPDGQRREWIKPIMFSGGIGSMEADHISKEAPEPGMEVVKVGGPVYRIGVGGGAASSVQVQGDNTSDLDFGAVQRGDPEMEQKMNRVIRACVEAPKGNPICSLHDQGAGGNGNVLKELSDPAGAIIYTSRFQLGDPTLNALEIWGAEYQESNALLLRSPNRDFLTHVSARERCPACFVGTITGDRRIVLVDDRECPVRRNGQGDAPPTPPPTPVDLELEWVLGKMPRKEFFLQRKPPMLQPLALPPGLSVHQALERVLRLPAVASKRYLTNKVDRSVGGLVAQQQCVGPLQTPLADVAVVALSHEELIGAATALGEQPVKSLLDPKVAARLAVAEALTNLVFALVTDLRDVKCSGNWMWAAKLPGEGAALADACEAMVAVMAALGVAVDGGKDSLSMAARVGTETVRAPGSLVISAYAVCPDITATVTPDLKHPEGRGHLLYVALSPGQHRLGGTALAQCFSQLGEHPPDLDLPENLVRAFSITQGLLKDRLLCSGHDVSDGGLVTCLLEMAFAGNCGLQVDVPVPRVDVLSVLFAEEPGLVLEVQEPDLAQVLKRYRDAGLHCLELGHTGEAGPHAMVRVSVNGAVVLEEPVGELRALWEETSFQLDRLQAEPRCVAEEERGLRERMGPSYCLPPTFPKASVPREPGGPSPRVAILREEGSNGDREMADAFHLAGFEVWDVTMQDLCSGAIGLDTFRGVAFVGGFSYADVLGSAKGWAAAVTFHPRAGAELRRFRKRPDTFSLGVCNGCQLLALLGWVGGDPNEDAAEMGPDSQPARPGLLLRHNLSGRYESRWASVRVGPGPALMLRGMEGAVLPVWSAHGEGYVAFSSPELQAQIEARGLAPLHWADDDGNPTEQYPLNPNGSPGGVAGICSCDGRHLAVMPHPERAVRPWQWAWRPPPFDTLTTSPWLQLSINARNWTLEGSC

SEQ ID NO: 272 - protein, 31 aa, Homo sapiens
STFAVDGKDCKVNKEVERVLKEFHQAGKPIG

SEQ ID NO: 273 - protein, 266 aa, Homo sapiens
ACISFGPKNRSIGAAAKSQVISNAKNTVQGFKRFHGRAFSDPFVEAEKSNLAYDIVQLPTGLTGIKVTYMEEERNFTTEQVTAMLLSKLKETAESVLKKPVVDCVVSVPCFYTDAERRSVMDATQIAGLNCLRLMNETTAVALAYGIYKQDLPALEEKPRNVVFVDMGHSAYQVSVCAFNRGKLKVLATAFDTTLGGRKFDEVLVNHFCEEFGKKYKLDIKSKIRALLRLSQECEKLKKLMSANASDLPLSIECFMNDVDVSGTMN

SEQ ID NO: 274 - protein, 1805 aa, Homo sapiens [sequence omitted]

SEQ ID NO: 275 - protein, 480 aa, Homo sapiens [sequence omitted]

SEQ ID NO: 276 - protein, 755 aa, Homo sapiens
ANKANTSGDFEKDDDAYKTEDSDDIHFEPVVQMPEKVELVTGEEGEKVLYSQGVKLFRFDAEVRQWKERGLGNLKILKNEVNGKLRMLMRREQVLKVCANHWITTTMNLKPLSGSDRAWMWSASDFSDGDAKLERLAAKFKTPELAEEFKQKFEECQRLLLDIPLQTPHKLVDTGRAAKLIQRAEEMKSGLKDFKTFLTNDQTKVTEEENKGSGTGVAGASDTTIKPNAENTGPTLEWDNYDLREDALDDSVSSSSVHASPLASSPVRKNLFRFDESTTGSNFSFKSALSLSKSPAKLNQSGTSVGTDEESVVTQEEERDGQYFEPVVPLPDLVEVSSGEENEQVVFSHRAEIYRYDKDVGQWKERGIGDIKILQNYDNKQVRIVMRRDQVLKLCANHRITPDMSLQNMKGTERVWVWTACDFADGERKVEHLAVRFKLQDVADSFKKIFDEAKTAQEKDSLITPHVSRSSTPRESPCGKIAVAVLEEITRERTDVIQGDDVADAASEVEVSSTSETTTKAVVSPPKFVFGSESVKRIFSSEKSKPFAFGNSSATGSLFGFSFNAPLKSNNSETSSVAQSGSESKVEPKKCELSKNSDIEQSSDSKVKNLSASFPTEESSINYTFKTPEKEPPLWHAEFTKEELVQKLRSTTKSADHLNGLLREIEATNAVLMEQIKLLKSEIRRLERNQEREKSAANLEYLKNVLLQFIFLKPGSERERLLPVINTMLQLSPEEKGKLAAVAQDEEENPSRSSG

SEQ ID NO: 277 - protein, 2375 aa, Homo sapiens
MQSLPKGTVIVQPEPVLNEDKDDFKGPEFRSRSKMKTENLKKRGEDGLHGIVSCTACGQQVNHFQKDSIYRHPSLQVLICKNCFKYYMSDDISRDSDGMDEQCRWCAEGGNLICCDFCHNAFCKKCILRNLGRKELSTIMDENNQWYCYICHPEPLLDLVTACNSVFENLEQLLQQNKKKIKVDSEKSNKVYEHTSRFSPKKTSSNCNGEEKKLDDSCSGSVTYSYSALIVPKEMIKKAKKLIETTANMNSSYVKFLKQATDNSEISSATKLRQLKAFKSVLADIKKAHLALEEDLNSEFRAMDAVNKEKNTKEHKVIDAKFETKARKGEKPCALEKKDISKSEAKLSRKQVDSEHMHQNVPTEEQRTNKSTGGEHKKSDRKEEPQYEPANTSEDLDMDIVSVPSSVPEDIFENLETAMEVQSSVDHQGDGSSGTEQEVESSSVKLNISSKDNRGGIKSKTTAKVTKELYVKLTPVSLPNSPIKGADCQEVPQDKDGYKSCGLNPKLEKCGLGQENSDNEHLVENEVSLLLEESDLRRSPRVKTTPLRRPTETNPVTSNSDEECNETVKEKQKLSVPVRKKDKRNSSDSAIDNPKPNKLPKSKQSETVDQNSDSDEMLAILKGVSRMSHSSSSDTDINEIHTNHKTLYDLKTQAGKDDKGKRKRKSSTSGSDFDTKKGKSAKSSIISKKKRQTQSESSNYDSELEKEIKSMSKIGAARTTKKRIPNTKDFDSSEDEKHSKKGMDNQGHKNLKTSQEGSSDDAERKQERETFSSAEGTVDKDTTIMELRDRLPKKQQASASTDGVDKLSGKEQSFTSLEVRKVAETKEKSKHLKTKTCKKVQDGLSDIAEKFLKKDQSDETSEDDKKQSKKGTEEKKKPSDFKKKVIKMEQQYESSSDGTEKLPEREEICHFPKGIKQIKNGTTDGEKKSKKIRDKTSKKKDELSDYAEKSTGKGDSCDSSEDKKSKNGAYGREKKRCKLLGKSSRKRQDCSSSDTEKYSMKEDGCNSSDKRLKRIELRERRNLSSKRNTKEIQSGSSSSDAEESSEDNKKKKQRTSSKKKAVIVKEKKRNSLRTSTKRKQADITSSSSSDIEDDDQNSIGEGSSDEQKIKPVTENLVLSSHTGFCQSSGDEALSKSVPVTVDDDDDDNDPENRIAKKMLLEEIKANLSSDEDGSSDDEPEEGKKRTGKQNEENPGDEEAKNQVNSESDSDSEESKKPRYRHRLLRHKLTVSDGESGEEKKTKPKEHKEVKGRNRRKVSSEDSEDSDFQESGVSEEVSESEDEQRPRTRSAKKAELEENQRSYKQKKKRRRIKVQEDSSSENKSNSEEEEEEKEEEEEEEEEEEEEEEDENDDSKSPGKGRKKIRKILKDDKLRTETQNALKEEEERRKRIAEREREREKLREVIEIEDASPTKCPITTKLVLDEDEETKEPLVQVHRNMVIKLKPHQVDGVQFMWDCCCESVKKTKKSPGSGCILAHCMGLGKTLQVVSFLHTVLLCDKLDFSTALVVCPLNTALNWMNEFEKWQEGLKDDEKLEVSELATVKRPQERSYMLQRWQEDGGVMIIGYEMYRNLAQGRNVKSRKLKEIFNKALVDPGPDFVVCDEGHILKNEASAVSKAMNSIRSRRRIILTGTPLQNNLIEYHCMVNFIKENLLGSIKEFRNRFINPIQNGQCADSTMVDVRVMKKRAHILYEMLAGCVQRKDYTALTKFLPPKHEYVLAVRMTSIQCKLYQYYLDHLTGVGNNSEGGRGKAGAKLFQDFQMLSRIWTHPWCLQLDYISKENKGYFDEDSMDEFIASDSDETSMSLSSDDYTKKKKKGKKGKKDSSSSGSGSDNDVEVIKVWNSRSRGGGEGNVDETGNNPSVSLKLEESKATSSSNPSSPAPDWYKDFVTDADAEVLEHSGKMVLLFEILRMAEEIGDKVLVFSQSLISLDLIEDFLELASREKTEDKDKPLIYKGEGKWLRNIDYYRLDGSTTAQSRKKWAEEFNDETNVRGRLFIISTKAGSLGINLVAANRVIIFDASWNPSYDIQSIFRVYRFGQTKPVYVYRFLAQGTMEDKIYDRQVTKQSLSFRVVDQQQVERHFTMNELTELYTFEPDLLDDPNSEKKKKRDTPMLPKDTILAELLQIHKEHIVGYHEHDSLLDHKEEEELTEEERKAAWAEYEAEKKVLTMRFNIPTGTNLPPVSFNSQTPYIPFNLGALSAMSNQQLEDLINQGREKVVEATNSVTAVRIQPLEDIISAVWKENMNLSEAQVQALALSRQASQELDVKRREAIYNDVLTKQQMLISCVQRILMNRRLQQQYNQQQQQQMTYQQATLGHLMMPKPPNLIMNPSNYQQIDMRGMYQPVAGGMQPPPLQRAPPPMRSKNPGPSQGKSM

SEQ ID NO: 278 - protein, 113 aa, Homo sapiens
  VARIANT 2, 6, 16, 17: Xaa = Any Amino Acid
MXEFIXERNLTNVRYXXKPSASLPTLLNIREFTRERNPMNVSNVGKHLATDHPLLNTREFIQERNPMDVMSVGKHLAFVHTLLYIREYILERDPMNVRNVGRPLASFCCFFPR

SEQ ID NO: 279 - protein, 434 aa, Homo sapiens [sequence omitted]

SEQ ID NO: 280 - protein, 296 aa, Homo sapiens
DFEEVHVSSNADEEDIRNAIMAIRRNRVALKGNIETNHNLPPSHKSRNNILRTSLDLYANVIHWKSLPGVVTRHKDIDILIVRENTEGEYSSLEHESVAGVVESLKIITKAKSLRIAEYAFKLAQESGRKKVTAVHKANIMKLGDGLFLQCCREVAARYPQITFENMIVDNTTMQLVSRPQQFDVMVMPNLYGNIVNNVCAGLVGGPGLVAGANYGHVYAVFETATRNTGKSIANKNIANPTATLLASCMMLDHLKLHSYATSIRKAVLASMDNENVRFPSHPTLLPRPVSPCSLL

SEQ ID NO: 281 - protein, 79 aa, Homo sapiens [sequence omitted]

SEQ ID NO: 282 - protein, 114 aa, Homo sapiens
MYYKFSGFTQKLAGAWASEAYSPQGLKPVVSTEAPPIIFATPTKLTSDSTVYDYAGKNKVPELQKFFQKADGVPVYLKRGLPDQMLYRTTMALTVGGTIYCLIALYNASQPKNK

SEQ ID NO: 283 - protein, 1884 aa, Homo sapiens
VAGCRRRGAGDPNMANLEESFPRGGTRKIHKPEKAFQQSVEQDNLFDISTEEGSTKRKKSQKGPAKTKKLKIEKRESSKSAREKFEILSVESLCEGMRILGCVKEVNELELVISLPNGLQGFVQVTEICDAYTKKLNEQVTQEQPLKDLLHLPELFSPGMLVRCVVSSLGITDRGKKSVKLSLNPKNVNRVLSAEALKPGMLLTGTVSSLEDHGYLVDIGVDGTRAFLPLLKAQEYIRQKNKGAKLKVGQYLNCIVEKVKGNGGVVSLSVGHSEVSTAIATEQQSWNLNNLLPGLVVKAQVQKVTPFGLTLNFLTFFTGVVDFMHLDPKKAGTYFSNQAVRACILCVHPRTRVVHLSLRPIFLQPGRPLTRLSCQNLGAVLDDVPVQGFFKKAGATFRLKDGVLAYARLSHLSDSKNVFNPEAFKPGNTHKCRIIDYSQMDELALLSLRTSIIEAQYLRYHDIEPGAVVKGTVLTIKSYGMLVKVGEQMRGLVPPMHLADILMKNPEKKYHIGDEVKCRVLLCDPEAKKLMMTLKKTLIESKLPVITCYADAKPGLQTHGFIIRVKDYGCIVKFYNNVQGLVPKHELSTEYIPDPERVFYTGQVVKVVVLNCEPSKERMLLSFKLSSDPEPKKEPAGHSQKKGKAINIGQLVDVKVLEKTKDGLEVAVLPHNIRAFLPTSHLSDHVANGPLLHHWLQAGDILHRVLCLSQSEGRVLLCRKPALVSTVEGGQDPKNFSEIHPGMLLIGFVKSIKDYGVFIQFPSGLSGLAPKAIMSDKFVTSTSDHFVEGQTVAAKVTNVDEEKQRMLLSLRLSDCGLGDLAITSLLLLNQCLEELQGVRSLMSNRDSVLIQTLAEMTPGMFLDLVVQEVLEDGSVVFSGGPVPDLVLKASRYHRAGQEVESGQKKKVVILNVDLLKLEVHVSLHQDLVNRKARKLRKGSEHQAIVQHLEKSFAIASLVETGHLAAFSLTSHLNDTFRFDSEKLQVGQGVSLTLKTTEPGVTGLLLAVEGPAAKRTMRPTQKDSETVDEDEEVDPALTVGTIKKHTLSIGDMVTGTVKSIKPTHVVVTLEDGIIGCIHASHILDDVPEGTSPTTKLKVGKTVTARVIGGRDMKTFKYLPISHPRFVRTIPELSVRPSELEDGHTALNTHSVSPMEKIKQYQAGQTVTCFLKKYNVVKKWLEVEIAPDIRGRIPLLLTSLSFKVLKHPDKKFRVGQALRATVVGPDSSKTFLCLSLTGPHKLEEGEVAMGRVVKVTPNEGLTVSFPFGKIGTVSIFHMSDSYSETPLEDFVPQKVVRCYILSTADNVLTLSLRSSRTNPETKSKVEDPEINSIQDIKEGQLLRGYVGSIQPHGVFFRLGPSVVGLARYSHVSQHSPSKKALYNKHLPEGKLLTARVLRLNHQKNLVELSFLPGDTGKPDVLSASLEGQLTKQEERKTEAEERDQKGEKKNQKRNEKKNQKGQEEVEMPSKEKQQPQKPQAQKRGGRECRESGSEQERVSKKPKKAGLSEEDDSLVDVYYREGKEEAEETNVLPKEKQTKPAEAPRLQLSSGFAWNVGLDSLTPALPPLAESSDSEEDEKPHQATIKKSKKERELEKQKAEKELSRIEEALMDPGRQPESADDFDRLVLSSPNSSILWLQYMAFHLQATEIEKARAVAERALKTISFREEQEKLNVWVALLNLENMYGSQESLTKVFERAVQYNEPLKVFLHLADIYAKSEKFQEAGELYNRMLKRFRQEKAVWIKYGAFLLRRSQAAASHRVLQRALECLPSKEHVDVIAKFAQLEFQLGDAERAKAIFENTLSTYPKRTDVWSVYIDMTIKHGSQKDVRDIFERVIHLSLAPKRMKFFFKRYLDYEKQHGTEKDVQAVKAKALEYVEAKSSVLED

SEQ ID NO: 284 - protein, 1439 aa, Homo sapiens [sequence omitted]

SEQ ID NO: 285 - protein, 1280 aa, Homo sapiens
MDLEGDRNGGAKKKNFFKLNNKSEKDKKEKKPTVSVFSMFRYSNWLDKLYMVVGTLAAIIHGAGLPLMMLVFGEMTDIFANAGNLEDLMSNITNRSDINDTGFFMNLEEDMTRYAYYYSGIGAGVLVAAYIQVSFWCLAAGRQIHKIRKQFFHAIMRQEIGWFDVHDVGELNTRLTDDVSKINEGIGDKIGMFFQSMATFFTGFIVGFTRGWKLTLVILAISPVLGLSAAVWAKILSSFTDKELLAYAKAGAVAEEVLAAIRTVIAFGGQKKELERYNKNLEEAKRIGIKKAITANISIGAAFLLIYASYALAFWYGTTLVLSGEYSIGQVLTVFFSVLIGAFSVGQASPSIEAFANARGAAYEIFKIIDNKPSIDSYSKSGHKPDNIKGNLEFRNVHFSYPSRKEVKILKGLNLKVQSGQTVALVGNSGCGKSTTVQLMQRLYDPTEGMVSVDGQDIRTINVRFLREIIGVVSQEPVLFATTIAENIRYGRENVTMDEIEKAVKEANAYDFIMKLPHKFDTLVGERGAQLSGGQKQRIAIARALVRNPKILLLDEATSALDTESEAVVQVALDKARKGRTTIVIAHRLSTVRNADVIAGFDDGVIVEKGNHDELMKEKGIYFKLVTMQTAGNEVELENAADESKSEIDALEMSSNDSRSSLIRKRSTRRSVRGSQAQDRKLSTKEALDESIPPVSFWRIMKLNLTEWPYFVVGVFCAIINGGLQPAFAIIFSKIIGVFTRIDDPETKRQNSNLFSLLFLALGIISFITFFLQGFTFGKAGEILTKRLRYMVFRSMLRQDVSWFDDPKNTTGALTTRLANDAAQVKGAIGSRLAVITQNIANLGTGIIISFIYGWQLTLLLLAIVPIIAIAGVVEMKMLSGQALKDKKELEGAGKIATEAIENFRTVVSLTQEQKFEHMYAQSLQVPYRNSLRKAHIFGITFSFTQAMMYFSYAGCFRFGAYLVAHKLMSFEDVLLVFSAVVFGAMAVGQVSSFAPDYAKAKISAAHIIMIIEKTPLIDSYSTEGLMPNTLEGNVTFGEVVFNYPTRPDIPVLQGLSLEVKKGQTLALVGSSGCGKSTVVQLLERFYDPLAGKVLLDGKEIKRLNVQWLRAHLGIVSQEPILFDCSIAENIAYGDNSRVVSQEEIVRAAKEANIHAFIESLPNKYSTKVGDKGTQLSGGQKQRIAIARALVRQPHILLLDEATSALDTESEKVVQEALDKAREGRTCIVIAHRLSTIQNADLIVVFQNGRVKEHGTHQQLLAQKGIYFSMVSVQAGTKRQ

SEQ ID NO: 286 - protein, 227 aa, Homo sapiens [sequence omitted]

SEQ ID NO: 287 - protein, 315 aa, Homo sapiens
MATTATCTRFTDDYQLFEELGKGAFSVVRRCVKKTSTQEYAAKIINTKKLSARDHQKLEREARICRLLKHPNIVRLHDSISEEGFHYLVFDLVTGGELFEDIVAREYYSEADASHCIHQILESVNHIHQHDIVHRDLKPENLLLASKCKGAAVKLADFGLAIEVQGEQQAWFGFAGTPGYLSPEVLRKDPYGKPVDIWACGVILYILLVGYPPFWDEDQHKLYQQIKAGAYDFPSPEWDTVTPEAKNLINQMLTINPAKRITADQALKHPWVCQRSTVASMMHRQETVECLRKFNARRKLKGAILTTMLVSRNFS

SEQ ID NO: 288 - protein, 491 aa, Homo sapiens
RQLLLDTTDKFRFFKAVRELMLWMDEVNLQMDAQERPRDVSSADLVIKNQQGIKAEIEARADRFSSCIDMGKELLARSHYAAEEISEKLSQLQARRQETAEKWQEKMDWLQLVLEVLVFGRDAGMAEAWLCSQEPLVRSAELGCTVDEVESLIKRHEAFQKSAVAWEERFCALEKLTALEEREKERKRKREEEERRKQPPAPEPTASVPPGDLVGGQTASDTTWDGTQPRPPPSTQAPSVNGVCTDGEPSQPLLGQQRLEHSSFPEGPGPGSGDEANGPRGERQTRTRGPAPSAMPQSRSTESAHAATLPPRGPEPSAQEQMEGMLCRKQEMEAFGKKAANRSWQNVYCVLRRGSLGFYKDAKAASAGVPYHGEVPVSLARAQGSVAFDYRKRKHVFKLGLQDGKEYLFQAKDEAEMSSWLRVVNAAIATASSASGEPEEPVVPSTTRGMTRAMTMPPVSPVGAEGPVVLRSKDGREREREKRFSFFKKNK

SEQ ID NO: 289 - protein, 372 aa, Homo sapiens
MASNEDFSITQDLEIPADIVELHDINVEPLPMEDIPTESVQYEDVDGNWIYGGHNHPPLMVLQPLFTNTGYGDHDQEMLMLQTQEEVVGYCDSDNQLGNDLEDQLALPDSIEDEHFQMTLASLSASAASTSTSTQSRSKKPSKKPSGKSATSTEANPAGSSSSLGTRKWEQKQMQVKTLEGEFSVTMWSPNDNNDQGAVGEGQAENPPDYSEYLKGKKLPPGGLPGIDLSDPKQLAEFTKVKPKRSKGEPPKTVPCSYSGCEKMFRDYAAMRKHLHIHGPRVHVCAECGKAFLESSKLRRHQLVHTGEKPFQCTFEGCGKRFSLDFNLRTHLRIHTGDKPFVCPFDVCNRKFAQSTNLKTHILTHVKTKNNP

SEQ ID NO: 290 - protein, 132 aa, Homo sapiens
ESETTTSLVLERSLNRVHLLGRVGQDPVLRQVEGKNPVTIFSLATNEMWRSGDSEVYQLGDVSQKTTWHRISVFRPGLRDVAYQYVKKGSRIYLEGKIDYGEYMDKNNVRRQATTIIADNIIFLSDQTKEKE

SEQ ID NO: 291 - protein, 481 aa, Homo sapiens [sequence omitted]

SEQ ID NO: 292 - protein, 317 aa, Homo sapiens
MWLYLAAFVGLYYLLHWYRERQVVSHLQDKYVFITGCDSGFGNLLARQLDARGLRVLAACLTDKGAEQLRGQTSDRLETVTLDVTKMESIAAATQWVKEHVGDRRLWGLVNNAGILTPITLCEWLNTEDSMNMLKVNLIGVIQVTLSMLPLVRRARGKNCQCLQHSGKSCFLCRGYCVSKYGVEAFSDILRREIQHFGVKISIVEPGYFRTGMTNMTQSLERMKQSWKEAPKHIKETYGQQYFDALYNIMKEGLLNCSTNLNLVTDCMEHALTSVHPRTRYSAGWDAKFFFIPLSYLPTSLADYILTRSWPKPAQAV

SEQ ID NO: 293 - protein, 410 aa, Homo sapiens
MGPQIFHKTSELFLPATSCPSCPDQNEEDVSQTQYKECCGGGWCSHSIFAVWHFAALGAGFSDKTPAHTVTMACISANQAMTTGVGLIASGQCDVIVAGGVELMSDVPIRHSRKMRKLMLDLNKAKSMGQRLSLISKFRFNFLAPELPAVSEFSTSETMGHSADRLAAAFAVSRLEQDEYALRSHSLAKKAQDEGLLSDVVPFKVPGKDTVTKDNGIRPSSLEQMAKLKPAFIKPYGTVTAANSSFLTDGASAMLIMAEEKALAMGYKPKAYLRDFMYVSQDPKDQLLLGPTYATPKVLEKAGLTMNDIDAFEFHEAFSGQILANFKAMDSDWFAENYMGRKTKVGLPPLEKFNNWGGSLSLGHPFGATGCRLVMAAANRLRKEGGQYGLVAACAAGGQGHAMIVEAYPK

SEQ ID NO: 294 - protein, 1366 aa, Homo sapiens
MAQALLVPPGPESFRLFTRESLAAIEKRAAEEKAKKPKKEQDNDDENKPKPNSDLEAGKNLPFIYGDIPPEMVSEPLEDLDPYYINKKTFIVMNKGKAIFRFSATSALYILTPLNPVRKIAIKILVHSLFSMLIMCTILTNCVFMTLSNPPDWTKNVEYTFTGIYTFESLIKILVRGFCLEDFTFLRDPWNWLDFSVIVMAYVTEFVSLGNVSALRTFRVLRALKTISVIPGLKTIVGALIQSVKKLSDVMILTVFCLSVFALIGLQLFMGNLRNKCLQWPPSDSAFETNTTSYFNGTMDSNGTFVNVTMSTFNWKDNIGDDSHFYVLDGQKDPLLCGNGSDAGQCPEGYICVKAGRNPNYGYTSFDTFSWAFLSLFRLMTQDYWENLYQLTLRAAGKTYTIFFVLVIFLGSFYLVNLILAVVAMAYEEQNQATLEEAEQKEAEFQQMLEQLKKQQEEAQAVAAASAASRDFSGIGGLGELLESSSEASKLSSKSAKEWRNRRKKRRQREHLEGNNKGERDSFPKSESEDSVKRSSFLFSMDGNRLTSDKKFCSPHQSLLSIRGSLFSPRRNSKTSIFSFRGRAKDVGSENDFADDEHSTFEDSETRRDSLFEPHRHGERRNSNGTTTETEVRKRRLSSYQISMEMLEDSSGRQRAVSIASILTNTMEELEESRQKCPPCWYRFANVFLIWDCCDAWLKVKHLVNLIVMDPFVDLAITICIVLNTLFMAMEHYPMTEQFSSVLTVGNLVFTGIFTAEMVLKIIAMDPYYYFQEGWNIFDGIIVSLSLMELGLSNVEGLSVLRSFRLLRVFKLAKSWPTLNMLIKIIGNSVGALGNLTLVLAIIVFIFAVVGMQLFGKSYKECVCKINDDCTLPRWHMNDFFHSFLIVFRVLCGEWIETMWDCMEVAGQTMCLIVFMLVMVIGNLVVLNLFLALLLSSFSSDNLAATDDDNEMNNLQIAVGRMQKGIDYVKNKMRECFQKAFFRKPKVIEIHEGNKIDSCMSNNTGIEISKALNYLRDGNGTTSGVGTGSSVEKYVIDENDYMSFINNPSLTVTVPIAVGESDFENLNTEEFSSESELEESKEKLNATSSSEGSTVDVVLPREGEQAETEPEEDLKPEACFTEGCIKKFPFCQVSTEEGKGKIWWNLRKTCYSIVEHNWFETFIVFMILLSSGALAFEDIYIEQRKTIKTMLEYADKVFTYIFILEMLLKWVAYGFQTYFTNAWCRLDFLIVDVSLVSLVANALGYSELGAIKSLRTLRALRPLRALSRFEGMRVVVNALVGAIPSIMNVLLVCLIFWLIFSIMGVNLFAGKFYHCVNMTTGNMFDISDVNNLSDCQALGKQARWKNVKVNFDNVGAGYLALLQVVS

SEQ ID NO: 295 - protein, 1223 aa, Homo sapiens [sequence omitted]

SEQ ID NO: 296 - protein, 285 aa, Homo sapiens [sequence omitted]

SEQ ID NO: 297 - protein, 285 aa, Homo sapiens [sequence omitted]

SEQ ID NO: 298 - protein, 1081 aa, Homo sapiens
MGKLIRMGPQERWLLRTKRLHWSRLLFLLGMLIIGSTYQHLRRPRGLSSLWAAVSSHQPIKLASRDLSSEEMMMMSSSPSKPSSEMGGKMLVPQASVGSDEATLSMTVENIPSMPKRTAKMIPTTTKNNYSPTAAGTERRKEDTPTSSRTLTYYTSTSSRQIVKKYTPTPRGEMKSYSPTQVREKVKYTPSPRGRRVGTYVPSTFMTMETSHAITPRTTVKDSDITATYKILETNSLKRIMEETTPTTLKGMFDSTPTFLTHEVEANVLTSPRSVMEKNNLFPPRRVESNSSAHPWGLVGKSNPKTPQGTVLLHTPATSEGQVTISTMTGSSPAETKAFTAAWSLRNPSPRTSVSAIKTAPAIVWRLAKKPSTAPSTSTTPTVRAKLTMQVHHCVVVKPTPAMLTTPSPSLTTALLPEELSPSPSVLPPSLPDLHPKGEYPPDLFSVEERRQGWVVLHVFGMMYVFVALAIVCDEYFVPALGVITDKLQISEDVAGATFMAAGGSAPELFTSLIGIFISHSNVGIGTIVGSAVFNILFVIGTCSLFSREILNLTWWPLFRDVSFYILDLIMLILFFLDSLIAWWESLLLLLAYAFYVFTMKWNKHIEVWVKEQLSRRPVAKVMALEDLSKLPSLLTRGSSSTSLHNSTIRSTIYQLMLHSLDPLREVRLAKEKEEESLNQGARAQPQAKAESKPEEEEPAKLPAVTVTPAPVPDIKGDQKENPGGQEDVAEAESTGEMPGEEGETAGEGETEEKSGGETQPEGEGETETQGKGEECEDENEAEGKGDNEGEDEGEIHAEDGEMKGNEGETESQELSAENHGEAKNDEKGVEDGGGSDGGDSEEEEEEEEEQEEEEEEEEQEEEEEEEEEEEEKGNEEPLSLDWPETRQKQAIYLFLLPIVFPLWLTVPDVRRQESRKFFVFTFLGSIMWIAMFSYLMVWWAHQVGETIGISEEIMGLTILAAGTSIPDLITSVIVARKGLGDMAVSSSVGSNIFDITVGLPVPWLLFSLINGLQPVPVSSNGLFCAIVLLFLMLLFVISSIASCKWRMNKILGFTMFLLYFVFLIISVMLEDRIISCPVSV

SEQ ID NO: 299 - protein, 691 aa, Homo sapiens
MCSSILKDILHLAEHDGTHPEQGLYTCAAEHDLHQKEQIREKLTRSDEWRPSFVNHSAHVGERNFTCTQGGKDFTASSDLLQQQVLNSGWKLYRDTQDGEAFQGEQNDFNSSQGGKDFCHQHGLFEHQKTHNGERPYEFSECGELFRYNSNLIKYQQNHAGERPYEGTEYGKTFIRKSNLVQHQKIHSEGFLSKRSDPIEHQEILSRPTPYECTQCGKAFLTQAHLVGHQKTHTGEQPYECNKCGKFFMYNSKLIRHQKVHTGERRYECSECGKLFMDSFTLGRHQRVHTGERPFECSICGKFFSHRSTLNMHQRVHAGKRLYKCSECGKAFSLKHNVVQHLKIHTGERPYECTECEKAFVRKSHLVQHQKIHTDAFSKRSDLIQHKRIDIRPRPYTCSECGKAFLTQAHLVGHQKIHTGERPYECTQCAKAFVRKSHLVQHEKIHTDAFSKRSDLIQHKRIDLRPRPYVCSECGKAFLTQAHLDGHQKIQTGERRYECNECGKFFLDSYKLVIHQRIHTGEKPYKCSKCGKFFRYRCTLSRHQKVHTGERPYECSECGKFFRDSYKLIIHQRVHTGEKPYECSNCGKFLRYRSTFIKHHKVCTGEKPHECSKCRELFRTKSSLIIHQQSHTGESPFKLRECGKDFNKCNTGQRQKTHTGERSYECGESSKVFKYNSSLIKHQIIHTGKRP

SEQ ID NO: 300 - protein, 253 aa, Homo sapiens
EEDDNEEEGDRKTGKQAFMGEQEKLDVHEKSKADKMKEGSDSSVSSEKGGRLPTPKLRELGGIQRTHHDLTTPAVGGAVLVSPSKMKPPAPEQRKRMTSQDCLETSKNDFTKKESRAVSLLTSPAAGIKTVDPLPLREDSEDNIHKFAEATLPVSKIPKYPTNPPGQLPSPPHVPSYWHPSRRIQGSLRDPEFQHNVGKARMNNLQLPQHEAFNDEDEDRLSEISARSAASSLRAFQTLARAKKRKENFWGKT

SEQ ID NO: 301 - protein, 574 aa, Homo sapiens
KEAASGKSDRRTPESSLHEALDQCMTALDLFLTNQFSEALSYLKPRTKESMYHSLTYATILEMQAMMTFDPQDILLAGNMMKEAQMLCQRHRRKSSVTDSFSSLVNRPTLGQFTEEEIHAEVCYAECLLQRAALTFLQDENMVSFIKGGIKVRNSYQTYKELDSLVQSSQYCKGENHPHFEGGVKLGVGAFNLTLSMLPTRILRLLEFVGFSGNKDYGLLQLEEGASGHSFRSVLCVMLLLCYHTFLTFVLGTGNVNIEEAEKLLKPYLNRYPKGAIFLFFAGRIEVIKGNIDAAIRRFEECCEAQQHWKQFHHMCYWELMWCFTYKGQWKMSYFYADLLSKENCWSKATYIYMKAAYLSMFGKEDHKPFGDDEVELFRAVPGLKLKIAGKSLPTEKFAIRKSRRYFSSNPISLPVPALEMMYIWNGYAVIGKQPKLTDGILEIITKAEEMLEKGPENEYSVDDECLVKLLKGLCLKYLGRVQEAEENFRSISANEKKIKYDHYLIPNALLELALLLMEQDRNEEAIKLLESAKQNYKNYSMESRTHFRIQAATLQAKSSLENSSRSMVSSVSL

SEQ ID NO: 302 - protein, 962 aa, Homo sapiens
MDEQALLGLNPNADSDFRQRALAYFEQLKISPDAWQVCAEALAQRTYSDDHVKFFCFQVLEHQVKYKYSELTTVQQQLIRETLISWLQAQMLNPQPEKTFIRNKAAQVFALLFVTEYLTKWPKFFFDILSVVDLNPRGVDLYLRILMAIDSELVDRDVVHTSEEARRNTLIKDTMREQCIPNLVESWYQILQNYQFTNSEVTCQCLEVVGAYVSWIDLSLIANDRFINMLLGHMSIEVLREEACDCLFEVVNKGMDPVDKMKLVESLCQVLQSAGFFSIDQEEDVDFLARFSKLVNGMGQSLIVSWSKLIKNGDIKNAQEALQAIETKVALMLQLLIHEDDDISSNIIGFCYDYLHILKRLTVLSDQQKANVEAIMLAVMKKLTYDEEYNFENEGEDEAMFVEYRKQLKLLLDRLAQVSPELLLASVRRVFSSTLQNWQTTRFMEVEVAIRLLYMLAEALPVSHGAHFSGDVSKASALQDMMRTLVTSGVSSYQHTSVTLEFFETVVRYEKFFTVEPQHIPCVLMAFLDHRGLRHSSAKVRSRTAYLFSRFVKSLNKQMNPFIEDILNRIQDLLELSPPENGHQSLLSSDDQLFIYETAGVLIVNSEYPAERKQALMRNLLTPLMEKFKILLEKLMLAQDEERQASLADCLNHAVGFASRTSKAFSNKQTVKQCGCSEVYLDCLQTFLPALSCPLQKDILRSGVRTFLHRMIICLEEEVLPFIPSASEHMLKDCEAKDLQEFIPLINQITAKFKIQVSPFLQQMFMPLLHAIFEVLLRPAEENDQSAALEKQMLRRSYFAFLQTVTGSGMSEVIANQGAENVERVLVTVIQGAVEYPDPIAQKTCFIILSKLVELWGGKDGPVGFADFVYKHIVPACFLAPLKQTFDLADAQTVLALSECAVTLKTIHLKRGPECVQYLQQEYLPSLQVAPEIIQEFCQALQQPDAKVFKNYLKVFFQRAKP

SEQ ID NO: 303 - protein, 164 aa, Homo sapiens
VNPTVFFDIAVDGEPLGRVSFELFADKVPKTAENFRALSTGEKGFGYKGSCFHRIIPGFMCQGGDFTRHNGTGGKSIYGEKFEDENFILKHTGPGILSMANAGPNTNGSQFFICTAKTEWLDGKHVVFGKVKEGMNIVEAMERFGSRNGKTSKKITIADCGQLE

SEQ ID NO: 304 - protein, 458 aa, Homo sapiens
ITPTEEGLKNSTQMSATYSQGFTIWLGPIIPFIVLCHPDTIRSITNASAAIAPKDNLFIRFLKPWLGEGILLSGGDKWSRHRRMLTPAFHFNILKSYITIFNKSANIMLDKWQHLASEGSSCLDMFEHISLMTLDSLQKCIFSFDSHCQERPSEYIATILELSALVEKRSQHILQHMDFLYYLSHDGRRFHRACRLVHDFTDAVIRERRRTLPTQGIDDFFKDKAKSKTLDFIDVLLLSKDEDGKALSDEDIRAEADTFMFGGHDTTASGLSWVLYNLARHPEYQERCRQEVQELLKDRDPKEIEWDDLAQLPFLTMCVKESLRLHPPAPFISRCCTQDIVLPDGRVIPKGITCLIDIIGVHHNPTVWPDPEVYDPFRFDPENSKGRSPLAFIPFSAGPRNCIGQAFAMAEMKVVLALMLLHFRFLPDHTEPRRKLELIMRAEGGLWLRVEPLNVSLQ

SEQ ID NO: 305 - protein, 50 aa, Homo sapiens
  VARIANT 30: Xaa = Any Amino Acid
MSKRFRQSSHLTTHKIIHTGEKPYKCEECXKLSTDSFTLLHIREFTLERN

SEQ ID NO: 306 - protein, 116 aa, Homo sapiens
DIVMTQSPSSLSASIGDRVSITCRASQGISNFLAWFQQKPGKAPKSLIYAASSLQSGVSSNFSGSGSGTDFTLTISSLQPEDFATYYCQQYNSYPPTFGQGTKVEIKRTVAAPSVF

SEQ ID NO: 307 - protein, 1563 aa, Homo sapiens
VNSSNPFFTSQTKANGNPACSAQLQHVSPPIFPAHLASVSTPLLSSMESVINPNITSQDKNEQGGMLCSQMENLPSTALPAQMEDLTKTVLPLNIDSGSDPFLPLPAESSSMSLFPSPADSGTNSVFSQLENNTNHYSSQIEGNTNSSFLKGGNGENAVFPSQVNVANNFSSTNAQQSAPEKVKKDRGRGPNGKERKPKHNKRAKWPAIIRDGKFICSRCYRAFTNPRSLGGHLSKRSYCKPLDGAEIAQELLQSNGQPSLLASMILSTNAVNLQQPQQSTFNPEACFKDPSFLQLLAENRSPAFLPNTFPRSGVTNFNTSVSQEGSEIIKQALETAGIPSTFEGAEMLSHVSTGCVSDASQVNATVMPNPTVPPLLHTVCHPNTLLTNQNRTSNSKTSSIEECSSLPVFPTNDLLLKTVENGLCSSSFPNSGGPSQNFTSNSSRVSVISGPQNTRSSHLNKKGNSASKRRKKVAPPLIAPNASQNLVTSDLTTMGLIAKSVEIPTTNLHSNVIPTCEPQSLVENLTQKLNNVNNQLFMTDVKENFKTSLESHTVLAPLTLKTENGDSQMMALNSCTTSVNSDLQISEDNVIQNFEKTLEIIKTAMNSQILEVKSGSQGAGETSQNAQINYNIQLPSVNTVQNNKLPDSSPFSSFISVMPTKSNIPQSEVSHKEDQIQEILEGLQKLKLENDLSTPASQCVLINTSVTLTPTPVKSTADITVIQPVSEMINIQFNDKVNKPFVCQNQGCNYSAMTKDALFKHYGKIHQYTPEMILEIKKNQLKFAPFKCVVPTCTKTFTRNSNLRAHCQLVHHFTTEEMVKLKIKRPYGRKSQSENVPASRSTQVKKQLAMTEENKKESQPALELRAETQNTHSNVAVIPEKQLIEKKSPDKTESSLQVITVTSEQCNTNALTNTQTKGRKIRRHKKEKEEKKRKKPVSQSLEFPTRYSPYRPYRCVHQGCFAAFTIQQNLILHYQAVHKSDLPAFSAEVEEESEAGKESEETETKQTLKEFRCQVSDCSRIFQAITGLIQHYMKLHEMTPEEIESMTASVDVGKFPCDQLECKSSFTTYLNYVVHLEADHGIGLRASKTEEDGVYKCDCEGCDRIYATRSNLLRHIFNKHNDKHKAHLIRPRRLTPGQENMSSKANQEKSKSKHRGTKHSRCGKEGIKMPKTKRKKKNNLENKNAKIVQIEENKPYSLKRGKHVYSIKARNDALSECTSRFVTQYPCMIKGCTSVVTSESNIIRHYKCHKLSKAFTSQHRNLLIVFKRCCNSQVKETSEQEGAKNDVKDSDTCVSESNDNSRTTATVSQKEVEKNEKDEMDELTELFITKLINEDSTSVETQANTSSNVSNDFQEDNLCQSERQKASNLKRVNKEKNVSQNKKRKVEKAEPASAAELSSVRKEEETAVAIQTIEEHPASFDWSSFKPMGFEVSFLKFLEESAVKQKKNTDKDHPNTGNKKGSHSNSRKNIDKTAVTSGNHVCPCKESETFVQFANPSQLQCSDNVKIVLDKNLKDCTELVLKQLQEMKPTVSLKKLEVHSNDPDMSVMKDISIGKATGRGQY

SEQ ID NO: 308 - protein, 1308 aa, Homo sapiens
DESSLLRRRGLQKELSLPRRGRGCRSGNRKSLVVGTPSPTLSRPLSPLSVPTAGSSPLDSPRNFSAASALNFPFARRADGRRWSLASLPSSGYGTNTPSSTLSSSSSSRERLHQLPFQPTPDELHFLSKHFRSSENVLDEEGGRSPRLRPRSRSLSPGRATGTFDNEIVMMNHVYRERFPKATAQMEGRLQEFLTAYAPGARLALADGVLGFIHHQIVELARDCLAKSGENLVTSRYFLEMQEKLERLLQDAHERSDSEEVSFIVQLVRKLLIIISRPARLLECLEFDPEEFYHLLEAAEGHAREGQGIKTDLPQYIIGQLGLAKDPLEEMVPLSHLEEEQPPAPESPESRALVGQSRRKPCESDFETIKLISNGAYGAVYLVRHRDTRQRFAIKKINKQNLILRNQIQQVFVERDILTFAENPFVVSMFCSFETRRHLCMVMEYVEGGDCATLLKNMGPLPVDMARLYFAETVLALEYLHNYGIVHRDLKPDNLLITSLGHIKLTDFGLSKIGLMSMATNLYEGHIEKDAREFIDKQVCGTPEYIAPEVIFRQGYGKPVDWWAMGVVLYEFLVGCVPFFGDTPEELFGQVVSDEIMWPEGDEALPADAQDLITRLLRQSPLDRLGTGGTHEVKQHPFFLALDWAGLLRHKAEFVPQLEAEDDTSYFDTRSERYRHLGSEDDETNDEESSTEIPQFSSCSHRFSKVYSSSEFLAVQPTPTFAERSFSEDREEGWERSEVDYGRRLSADIRLRSWTSSGSSCQSSSSQPERGPSPSLLNTISLDTMPKFAFSSEDEGVGPGPAGPKRPVFILGEPDPPPAATPVMPKPSSLSADTAALSHARLRSNSIGARHSTPRPLDAGRGRRLGGPRDPAPEKSRASSSGGSGGGSGGRVPKSASVSALSLIITADDGSGGPLMSPLSPRSLSSNPSSRDSSPSRDPSPVCGSLRPPIVIHSSGKKYGFSLRAIRVYMGDSDVYTVHHVVWSVEDGSPAQEAGLRAGDLITHINGESVLGLVHMDVVELLLKSGNKISLRTTALENTSIKVGPARKNVAKGRMARRSKRSRRRETQDRRKSLFKKISKQTSVLHTSRSFSSGLHHSLSSSESLPGSPTHSLSPSPTTPCRSPAPDVPADTTASPPSASPSSSSPASPAAAGHTRPSSLHGLAAKLGPPRPKTGRRKSTSSIPPSPLACPPISAPPPRSPSPLPGHPPAPARSPRLRRGQSADKLGTGERLDGEAGRRTRGPEAELVVMRRLHLSERRDSFKKQEAVQEVSFDEPQEEATGLPTSVPQIAVEGEEAVPVALGPTGRD

SEQ ID NO: 309 - protein, 161 aa, Homo sapiens
CMEKIAPTEFVMRALECVYHLGCFCCCVCERQLRKGDEFVLKEGQLLCKGDYEKEKDLLSSVSPDESDSVKSEDEDGDMKPAKGQGSQSKGSGDDGKDPRRPKRPRTILTTQQRRAFKASFEVSSKPCRKVRETLAAETGLSVRVVQVWFQNQRAKMKKLA

SEQ ID NO: 310 - protein, 141 aa, Homo sapiens
VLSPADKTNVKAAWGKVGAHAGEYGAEALERMFLSFPTTKTYFPHFDLSHGSAQVKGHGKKVADALTNAVAHVDDMPNALSALSDLHAHKLRVDPWNFKLLSHCLLVTLAAHLPAEFTPAVHASLDKFLASVSTVLTSKYR

SEQ ID NO: 311 - protein, 231 aa, Homo sapiens
GRHVRNLHKTAMQNGAGGALFVHRDTPENNPDTPFDFTPENYKRIEAIVKNYPEGHKAAAVLPVLDLAQRQNGWLPISAMNKVAEVLQVPPMRVYEVATFYTMYNRKPVGKYYIQVCTTTPCMLRNSDSILEAIQKKLGIKVGETTPDKLFTLIEVECLGACVNAPMVQINDNYYEDLTAKDIEEIIDELKAGKIPKPGPRSGRFSCEPAGGLTSLTEPPKGPGFGVQAGL

SEQ ID NO: 312 - protein, 84 aa, Homo sapiens
VKQIESKTAFQEALDAAGDKLVVVDFSATWCGPCKMIKPFFHDVASECEVKCMPTFQFFKKGQKVGEFSGANKEKLEATINELV

SEQ ID NO: 313 - protein, 1021 aa, Homo sapiens
  VARIANT 951: Xaa = Any Amino Acid
RLRLLLLESVSGLLQPRTGSAVAPVHPPNRSAPHLPGLMCLLRLHGSVGGAQNLSALGALVSLSNARLSSIKTRFEGLCLLSLLVGESPTELFQQHCVSWLRSIQQVLQTQDPPATMELAVAVLRDLLRYAAQLPALFRDISMNHLPGLLTSLLGLRPECEQSALEGMKACMTYFPRACGSLKGKLASFFLSRVDALSPQLQQLACECYSRLPSLGAGFSQGLKHTESWEQELHSLLASLHTLLGALYEGAETAPVQNEGPGVEMLLSSEDGDAHVLLQLRQRFSGLARCLGLMLSSEFGAPVSVPVQEILDFICRTLSVSSKNISLHGDGPCGCCCCPLSTLKALDLLSALILACGSRLLRFGILIGRLLPQVLNSWSIGRDSLSPGQERPYSTVRTKVYAILELWVQVCGASAGMLQGGASGEALLTHLLSDISPPADALKLRSPRGSPDGSLQTGKPSAPKKLKLDVGEAMAPPSHLLLPVPCKPSPSASEKIALRSPLSCSEALVTCAALTHPRVPPLQPMGPTCPTPAPVPLLRPHRPSGPHRSILRAPCPQWAPCPQQAPCPSAGPMPSAGPVPSEPWTSTTANLLGLLSRPSVCPPRLLPGPENHRAGSNEDPILAPSGTPPPTIPPDETFGGRVPRPAFVHYDKEEASDVEISLESDSDDSVVIVPEGLPPLPPPPPSGATPPPIAPTGPPTASPPVPAKEEPEELPAAPGPLPPPPPPPPPVPGPVTLPPPQLVPEGTPGGGGPPALEEDLTVININSSDEEEEEEGEEEEEEEEEEEEEEEEEEEEEEEDFEEEEEDEEEYFEEEEEEEEEFEEEFEEEEGELEEEEEEEDEEEEEELEEVEDLEFGTAGGEVEEGAPPPPTLPPALPPPESPPKVQPEPEPEPGLLLEVEEPGTEEERGADTAPTLAPEALPSQGEVEREGESPAAGPPPQELVEEEPSXPPTLLEEETEDGSDKVQPPPETPAEEEMETETEAEALQEKEQDDTAAMLADFIDCPPDDEKPPPPTEPDS

SEQ ID NO: 314 - protein, 334 aa, Homo sapiens [sequence omitted]

SEQ ID NO: 315 - protein, 998 aa, Homo sapiens [sequence omitted]

SEQ ID NO: 316 - protein, 394 aa, Homo sapiens
HSLLPVDDAINGLSEEQRQLRQTMAKFLQEHLAPKAQEIDRSNEFKNLREFWKQLGNLGVLGITAPVQYGGSGLGYLEHVLVMEEISRASGAVGLSYGAHSNLCINQLVRNGNEAQKEKYLPKLISGEYIGALAMSEPNAGSDVVSMKLKAEKKGNHYILNGNKFWITNGPDADVLIVYAKTDLAAVPASRGITAFIVEKGMPGFSTSKKLDKLGMRGSNTCELIFEDCKIPAANILGHENKGVYVLMSGLDLERLVLAGGPLGLMQAVLDHTIPYLHVREAFGQKIGHFQLMQGKMADMYTRLMACRQYVYNVAKACDEGHCTAKDCAGVILYSAECATQVALDGIQCFGGNGYINDFPMGRFLRDAKLYEIGAGTSEVRRLVIGRAFNADFH

SEQ ID NO: 317 - protein, 318 aa, Homo sapiens
MAAAAVSGALGRAGWRLLQLRCLPVARCRQALVPRAFHASAVGLRSSDEQKQQPPNSFSQQHSETQGAEKPDPESSHSPPRYTDQGGEEEEDYESEEQLQHRILTAALEFVPAHGWTAEAIAEGAQSLGLSSAAASMFGKDGSELILHFVTQCNTRLTRVLEEEQKLVQLGQAEKRKTDQFLRDAVETRLRMLIPYIEHWPRALSILMLPHNIPSSLSLLTSMVDDMWHYAGDQSTDFNWYTRRAMLAAIYNTTELVMMQDSSPDFEDTWRFLENRVNDAMNMGHTAKQVKSTGEALVQGLMGAAVTLKNLTGLNQRR

SEQ ID NO: 318 - protein, 318 aa, Homo sapiens; identical to SEQ ID NO: 317

SEQ ID NO: 319 - protein, 408 aa, Homo sapiens
MDFLLGNPFSSPVGQRIEKATDGSLQSEDWALNMEICDIINETEEGPKDALRAVKKRIVGNKNFHEVMLALTVLETCVKNCGHRFHVLVASQDFVESVLVRTILPKNNPPTIVHDKVLNLIQSWADAFRSSPDLTGVVTIYEDLRRKGLEFPMTDLDMLSPIHTPQRTVFNSETQSGQDSVGTDSSQQEDSGQHAAPLPAPPILSGDTPIAPTPEQIGKLRSELEMVSGNVRVMSEMLTELVPTQAEPADLELLQELNRTCRAMQQRVLELIPQIANEQLTEELLIVNDNLNNVFLRHERFERFRTGQTTKAPSEAEPAADLIDMGPDPAATGNLSSQLAGMNLGSSSVRAGLQSLEASGRLEDEFDMFALTRGSSLADQRKEVKYEAPQATDGLAGALDARQQSTGA

SEQ ID NO: 320 - protein, 655 aa, Homo sapiens [sequence omitted]

SEQ ID NO: 321 - protein, 107 aa, Homo sapiens
AVPPTYADLGKSARDVFTKGYGFGLIKLDLKTKSENGLEFTSSGSANTETTKVTGSLETKYRWTEYGLTFTEKWNTDNTLGTEITVEDQLARGLKLTFDSSFSPNTG

SEQ ID NO: 322 - protein, 1231 aa, Homo sapiens
DDSDGIPWSEERVVRKVLYLSLKEFKNSQKRQHAEGIAGSLKTVNGLLGNDQSKGLGPASEQSENEKDDASQVSSTSNDVSSSDFEEGPSRKRPRLQAQRKFAQSQPNSPSTTPVKIVEPLLPPPATQISDLSKRKPKTEDFLTFLCLRGSPALPNSMVYFGSSQDEEEVEEEDDETEDVKTATNNASSSCQSTPRKGKTHKHVHNGHVFNGSSRSTREKEPVQKHKSKEATPAKEKHSDHRADSRREQASANHPAAAPSTGSSAKGLAATHHHPPLHRSAQDLRKQVSKVNGVTRMSSLGAGVTSAKKMREVRPSPSKTVKYTATVTKGAVTYTKAKRELVKDTKPNHHKPSSAVNHTISGKTESSNAKTRKQVLSLGGASKSTGPAVNGLKVSGRLNPKSCTKEVGGRQLREGLQLREGLRNSKRRLEEAHQAEKPQSPPKKMKGAAGPAEGPGKKAPAERGLLNGHVKKEVPERSLERNRPKRATAGKSTPGRQAHGKADSASCENRSTSQPESVHKPQDSGKAEKGGGKAGWAAMDEIPVLRPSAKEFHDPLIYIESVRAQVEKFGMCRVIPPPDWRPECKLNDEMRFVTQIQHIHKLGRRWGPNVQRLACIKKHLKSQGITMDELPLIGGCELDLACFFRLINEMGGMQQVTDLKKWNKLADMLRIPRTAQDRLAKLQEAYCQYLLSYDSLSPEEHRRLEKEVLMEKEILEKRKGPLEGHTENDHHKFHPLPRFEPKNGLIHGVAPRNGFRSKLKEVGQAQLKTGRRRLFAQEKEVVKEEEEDKGVLNDFHKCIYKGRSVSLTTFYRTARNIMSMCFSKEPAPAEIEQEYWRLVEEKDCHVAVHCGKVDTNTHGSGFPVGKSEPFSRHGWNLTVLPNNTGSILRHLGAVPGVTIPWLNIGMVFSTSCWSRDQNHLPYIDYLHTGADCIWYCIPAEEENKLEDVVHTLLQANGTPGLQMLESNVMISPEVLCKEGIKVHRTVQQSGQFVVCFPGSFVSKVCCGYSVSETVHFATTQWTSMGFETAKEMKRRHIAKPFSMEKLLYQIAQAEAKKENGPTLSTISALLDELRDTELRQRRQLFEAGLHSSARYGSHDGSSTVADGKKKPRKWLQLETSERRCQICQHLCYLSMVVQENENVVFCLECALRHVEKQKSCRGLKLMYRYDEEQIISLVNQICGKVSGKNGSIENCLSKPTPKRGPRKRATVDVPPSRLSASSSSKSASSSS

SEQ ID NO: 323 - protein, 560 aa, Homo sapiens
VPMVVVPPVGAKGNTPATGTTQGKKAEGTQNQSKKAEGAPNQGRKAEGTPNQGKKTEGTPNQGKKAEGTPNQGKKAEGTPNQGKKAEGAQNQGKKVDTTPNQGKKVEGAPTQGRKAEGAQNQAKKVEGAQNQGKKAEGAQNQGKKAEGAQNQGKKAEGAQNQGKKAEGGQNQGKKTEEAQKQGKKAEGAQIQGKKNEGAQTQGKKAEGAQNQGKKNEGAQTQGKKAEGAQTQGKKADGAQNQGKKAEGAQNQGKKAEGAQNQGKKAEGAQNQGKKADGAQNQGKKAEGAQNQGKKAEGAQNQGTKAEGAQNQGKKAEGAQNQGKKAEGAQNQGKKAEGAQNQGKKAEGAQNQGKKAEGAQNQGKKAEGAQNQGKKAEGAQNQGKKAEGAQNQGKKAEGAQNQGKKAEGAQNQGKKAEGAQNQGKKVEGAQNQGKKAEGAQNQGKKAEGAQNQGKKAEGAQNQGQKGEGAQNQGKKTEGAQGKKAERSPNQGKKGEGAPIQGKKADSVANQGTKVEGITNQGKKAEGSPSEGKKAEGSPNQGKKADAAANQGKKTESASVQ

SEQ ID NO: 324 - protein, 734 aa, Homo sapiens
AAADSTSMSYSVTLTGPGPWGFRLQGGKDFNMPLTISRITPGSKAAQSQLSQGDLVVAIDGVNTDTMTHLEAQNKIKSASYNLSLTLQKSKRPIPISTTAPPVQTPLPVIPHQKDPALDTNGSLVAPSPSPEARASPGTPGTPELRPTFSPAFSRPSAFSSLAEASDPGPPRASLRAKTSPEGARDLLGPKALPGSSQPRQYNNPIGLYSAETLREMAQMYQMSLRGKASGVGLPGGSLPIKDLAVDSASPVYQAVIKSQNKPEDEADEWARRSSNLQSRSFRILAQMTGTEFMQDPDEEALRRSSTPIEHAPVCTSQATTPLLPASAQPPAAASPSAASPPLATAAAHTAIASASTTAPASSPADSPRPQASSYSPAVAASSAPATHTSYSEGPAAPAPKPRVVTTASIRPSVYQPVPASTYSPSPGANYSPTPYTPSPAPAYTPSPAPAYTPSPVPTYTPSPAPAYTPSPAPNYNPAPSVAYSGGPAEPASRPPWVTDDSFSQKFAPGKSTTSISKQTLPRGGPAYTPAGPQVPPLARGTVQRAERFPASSRTPLCGHCNNVIRGPFLVAMGRSWHPEEFTCAYCKTSLADVCFVEEQNNVYCERCYEQFFAPLCAKCNTKIMGEVMHALRQTWHTTCFVCAACKKPFGNSLFHMEDGEPYCEKDYINLFSTKCHGCDFPVEAGDKFIEALGHTWHDTCFICAVCHVNLEGQPFYSKKDRPLCKKHAHTINL

SEQ ID NO: 325 - protein, 1985 aa, Homo sapiens
PGCAARLSRARAPGPGAAGAGRKRLADPGPPPASRRLRAPGSRPRLAPCTRRAAQPAHARMAPRAAGGAPLSARAAAASPPPFQTPPRCPVPLLLLLLLGAARAGALEIQRRFPSPTPTNNFALDGAAGTVYLAAVNRLYQLSGANLSLEAEAAVGPVPDSPLCHAPQLPQASCEHPRRLTDNYNKILQLDPGQGLVVVCGSIYQGFCQLRRRGNISAVAVRFPPAAPPAEPVTVFPSMLNVAANHPNASTVGLVLPPAAGAGGSRLLVGATYTGYGSSFFPRNRSLEDHRFENTPEIAIRSLDTRGDLAKLFTFDLNPSDDNILKIKQGAKEQHKLGFVSAFLHPSDPPPGAQSYAYLALNSEARAGDKESQARSLLARICLPHGAGGDAKKLTESYIQLGLQCAGGAGRGDLYSRLVSVFPARERLFAVFERPQGSPAARAAPAALCAFRFADVRAAIRAARTACFVEPAPDVVAVLDSVVQGTGPACERKLNIQLQPEQLDCGAAHLQHPLSILQPLKATPVFRAPGLTSVAVASVNNYTAVFLGTVNGRLLKINLNESMQVVSRRVVTVAYGEPVHHVMQFDPADSVYLYLMTSHQMARVKVAACNVHSTCGDCVGAADAYCGWCALETRCTLQQDCTNSSQQHFWTSASEGPSRCPAMTVLPSEIDVRQEYPGMILQISGSLPSLSGMEMACDYGNNIRTVARVPGPAFGHQIAYCNLLPRDQFPPFPPNQDHVTVEMSVRVNGRNIVKANFTIYDCSRTAQVYPHTACTSCLSAQWPCFWCSQQHSCVSNQSRCEASPNPTSPQDCPRTLLSPLAPVPTGGSQNILVPLANTAFFQGAALECSFGLEEIFEAVWVNESVVRCDQVVLHTTRKSQVFPLSLQLKGRPARFLDSPEPMTVMVYNCAMGSPDCSQCLGREDLGHLCMWSDGCRLRGPLQPMAGTCPAPEIRAIEPLSGPLDGGTLLTIRGRNLGRRLSDVAHGVWIGGVACEPLPDRYTVSEEIVCVTGPAPGPLSGVVTVNASKEGKSRDRFSYVLPLVHSLEPTMGPKAGGTRITIHGNDLHVGSELQVLVNDTDPCTELMRTDTSIACTMPEGALPAPVPVCVRFERRGCVHGNLTFWYMQNPVITAISPRRSPVSGGRTITVAGERFHMVQNVSMAVHHIGREPTLCKVLNSTLITCPSPGALSNASAPVDFFINGRAYADEVAVAEELLDPEEAQRGSRFRLDYLPNPQFSTAKREKWIKHHPGEPLTLVIHKEQDSLGLQSHEYRVKIGQVSCDIQIVSDRIIHCSVNESLGAAVGQLPITIQVGNFNQTIATLQLGGSETAIIVSIVICSVLLLLSVVALFVFCTKSRRAERYWQKTLLQMEEMESQIREEIRKGFAELQTDMTDLTKELNRSQGIPFLEYKHFVTRTFFPKCSSLYEERYVLPSQTLNSQGSSQAQETHPLLGEWKIPESCRPNMEEGISLFSSLLNNKHFLIVFVHALEQQKDFAVRDRCSLASLLTIALHGKLEYYTSIMKELLVDLIDASAAKNPKLMLRRTESVVEKMLTNWMSICMYSCLRETVGEPFFLLLCAIKQQINKGSIDAITGKARYTLNEEWLLRENIEAKPRNLNVSFQGCGMDSLSVRAMDTDTLTQVKEKILEAFCKNVPYSQWPRAEDVDLEWFASSTQSYILRDLDDTSVVEDGRKKLNTLAHYKIPEGASLAMSLIDKKDNTLGRVKDLDTEKYFHLVLPTDELAEPKKSHRQSHRKKVLPEIYLTRLLSTKGTLQKFLDDLFKAILSIREDKPPLAVKYFFDFLEEQAEKRGISDPDTLHIWKTNSLPLRFWVNILKNPQFVFDIDKTDHIDACLSVIAQAFIDACSISDLQLGKDSPTNKLLYAKEIPEYRKIVQRYYKQIQDMTPLSEQEMNAHLAEESRKYQNEFNTNVAMAEIYKYAKRYRPQIMAALEANPTARRTQLQHKFEQVVALMEDNIYECYSEA

SEQ ID NO: 326 - protein, 1985 aa, Homo sapiens; identical to SEQ ID NO: 325

SEQ ID NO: 327 - protein, 343 aa, Homo sapiens
MYLNVIINNTWQGDFSQIKVFLMTLKKNMISKLKTECGCQFTSKLEGMFRDMSISNTTMDEFRQHLQATGVSLGGVDLTVRVLTTGYWPTQSATPKCNIPPAPRHAFEIFRRFYLAKHSGRQLTLQHHMGSADLNATFYGPVKKEDGSEVGVGGAQVTGSNTRKHILQVSTFQMTILMLFNNREKYTFEEIQQETDIPERELVRALQSLACGKPTQRVLTKEPKSKEIENGHIFTVNDQFTSKLHRVKIQTVAAKQGESDPERKETRQKVDDDRKHEIEAAIVRIMKSRKKMQHNVLVAEVTQQLKARFLPSPVVIKKRIEGLIEREYLARTPEDRKVYTYVA

SEQ ID NO: 328 - protein, 130 aa, Homo sapiens
KVFERCELARTLKRLGMDGYRGISLANWMCLAKWESGYNTRATNYNAGDRSTDYGLFQINSRYWCNDGKTPGAVNACHLSCSALLQDNIADAVACAKRVVRDPQGIRAWVAWRNRCQNRDVRQYVQGCGV

SEQ ID NO: 329 - protein, 130 aa, Homo sapiens
KVFERCELARTLKRLGMDGYRGISLANWMCLAKWESGYNTRATNYNAGDRSTDYGIFQLNSRYWCNDGKTPGAVNACHLSCSALLQDNIADAVACAKRVVRDPQGIRAWVAWRNRCQNRDVRQYVQGCGV

SEQ ID NO: 330 - protein, 463 aa, Homo sapiens [sequence omitted]

SEQ ID NO: 331 - protein, 201 aa, Homo sapiens
VSDPEEMELRGLQREYPVPASKRPPLRGVERSYASPSDNSSAEEEDPDGEEERCALGTAGSAEGCKRKRPRGAGGGGAGGSAGGGGKKPLPAKGSAAECKQSQRNAANARERARMRVLSKAFSRLKTSLPWVPPDTKLSKLDTLRLASSYIAHLRQLLQEDRYENGYVHPVNLTWPFVVSGRPDSDTKEVSAANRLCGTTA

SEQ ID NO: 332 - protein, 1380 aa, Homo sapiens [sequence omitted]

SEQ ID NO: 333 - protein, 1380 aa, Homo sapiens [sequence omitted]

SEQ ID NO: 334 - protein, 107 aa, Homo sapiens
GVQVETISPGDGRTFPKRGQTCVVHYTGMLEDGKKVDSSRDRNKPFKFMLGKQEVIRGWEEGVAQMSVGQRAKLTISPDYAYGATGHPGIIPPHATLVFDVELLKLE

SEQ ID NO: 335 - protein, 224 aa, Homo sapiens [sequence omitted]

SEQ ID NO: 336 - protein, 1443 aa, Homo sapiens
EQPNQVNYGNICTGLEVLSFLLTVLQSPAILSSFKPLQRGIAACMTCGNTKVLRAVHSLLSRLMSIFPTEPKYIVLNNVLLSLCFSWLLLFCETLGNFYILGTLMILKSACSNNPSYIDRLISVFMRSLQKMVREHLNPQAASGSTEATSGTSELVMLSLELVKTRLAVMSMEMRKNFIQAILTSLIEKSPDAKILRAVVKIVEEWVKNNSPMAANQTPTLREKSILLVKMMTYIEKRFPEDLELNAQFLDLVNYVYRDETLSGSELTAKLEPAFLSGLRCAQPLIRAKFFEVFDNSMKRRVYERLLYVTCSQNWEAMGNHFWIKQCIETGALLSAFVQLCHISTTLAEKTWVQLFPRLWKILSDRQQHALAGEISPFLCSGSHQVQRDCQPSALNCFVEAMSQCVPPIPIRPCVLKYLGKTHNLWFRSTLMLEHQAFEKGLSLQIKPKQTTEFYEQESITPPQQEILDSLAELYSLLQEEDMWAGLWQKRCKYSETATAIAYEQHGFFEQAQESYEKAMDKAKKEHERSNASPAIFPEYQLWEDHWIRCSKELNQWEALTEYGQSKGHINPYLVLECAWRVSNWTAMKEALVQVEVSCPKEMAWKVNMYRGYLAICHPEEQQLSFIERLVEMASSLAIREWRRLPHVVSHVHTPLLQSLLCWSHQAAQQIIELQEAAQINAGLQPTNLGRNNSLHDMKTVVKTWRNRLPIVSDDLSHWSSIFMWRQHHYQAIVTAYENSSQHDPSSNNAMLGVHASASAIIQYGKIARKQGLVNVALDILSRIHTIPTVPIVDCFQKIRQQVKCYLQLAGVMGKNECMQGLEVIESTNLKYFTKEMTAEFYALKGMFLAQINKSEEANKAFSAAVQMHDVLVKAWAMWGDYLENIFVKERQLHLGVSAITCYLHACRHQNESKSRKYLAKVLWLLSFDDDKNTLADAVDKYCIGVPPIQWLAWIPQLLTCLVGSEGKLLLNLISQVGRVYPQAVYFPIRTLYLTLKIEQRERYKSDFDFSVPGSMKLHNLISKLKKWIKILEAKTKQLPKFFLIEEKCRFLSNFSAQTAEVEIPGEFLMPKPTHYYIKIARFMPRVEIVQKHNTAARRLYIRGHNGKIYPYLVMNDACLTESRREERVLQLLRLLNPCLEKRKETTKRHLFFTVPRVVAVSPQMRLVEDNPSSLSLVEIYKQRCAKKGIEHDNPISRYYDRLATVQARGTQASHQVLRDILKEVQSNMVPRSMLKEWALHTFPNATDYWTFRKMFTIQLALIGFAEFVLHLNRLNPEMLQIAQDTGKLNVAYFRFDINDATGDLDANRPVPFRLTPNISEFLTTIGVSGPLTASMIAVARCFAQPNFKVDGILKTVLRDEIIAWHKKTQEDTSSPLSAAGQPENMDSQQLVSLVQKAVTAIMTRLHNLAQFEGGESKVNTLVAAANSLDNLCRMDPAWHPWL

SEQ ID NO: 337 - protein, 979 aa, Homo sapiens
MNNSMGRAHVLAHPTAIDTIARSLAADNIRTKIAALEILGAVCLVPGGHRKVLQAMLHFQVFATERTRFQSIVNDLDRSTYAYRDNVNLKTALMSFVNAVLNYGPGQENLEFRLHLRYEFLMLGIQPVIDKLRTHENETLDRHLDFFEMVRAEDEKEFARRFKEEHVDTKSAGSMFELLRRKLSHSPAYPHMLSLLQHMLLLPYTGHCTEHWLLIDRVVQQIVLQVEQRPNSDLIVDPDDPEKQLKLAAESPVHDPDVAPLQIDVAKLVRLLVKEEQLTQARKRADELERENFDVQSRLAKKEQELDLRMQEKEDLETGLARMRERLEKESAQHSQAVQRAQTAEMRAEDLQHRLISEQQERARLERLVTEGSIPDDQKVAGLTGCNGAVSPPPAPPMLKAIPPPPPPMAPSMMPPPPPPCPGAPPPPPSMAQTMAPAPPKVDLPKKNVPQPTNPLKSFNWSKLPDAKLQGTVWSELDESKLYNNMELESIDKLFSAYQKNGVSATDGSYEDLRVTGKAAKQKVLSVIDGRRAQNCTILLSKLKMSDMEISKAILSMDSNEQLQLDMVEQLLKFTPSAEERALLDEHSEDIESLARADRFLYEISKIPHYEQRLKSLHYKKRFMLTINDLVPRITSVMEASREVARSRRLRKLLELVLALGMIHCPFAKHSITQTTSIPPGNYMNRGARGNASGFRLASLNRLADTKSSAAKGTTLLHYLVQVIERKFKDLLKLEDDIPHVREASKVSLGEMDKDIQMLRTGLADVAREIEFHRSSGPAQQGDRFLPVMREFHAQASVRFAELEDKFQDMKTRFDRAVRLFGEDGSVLQPDEFFGIFDSFLAAFAEARHDNESFRRRQEEEEKRAKQEAELKKRTIERKNKTGLMTSVARNLGLKSGSSNGDPDSPAKGGDNKGEFDDLISALRTGDVFGEDMAKFKRSRKARVLNGGGSSTGHTSPPRHGSLQREESGRERERTVRRQ

SEQ ID NO: 338 - protein, 426 aa, Homo sapiens
FNNHGLQVQQQQQRNLSLHEYMSMELLQEAGVSVPKGYVAKSPDEAYAIAKKLGSKDVVIKAQVLAGGRGKGTFESGLKGGVKIVFSPEEAKAVSSQMIGKKLFTKQTGEKGRICNQVLVCERKYPRREYYFAITMERSFQGPVLIGSSHGGVNIEDVAAETPEAIIKEPIDIEEGIKKEQALQLAQKMGFPPNIVESAAENMVKLYSLFLKYDATMIEINPMVEDSDGAVLCMDAKINFDSNSAYRQKKIFDLQDWTQEDERDKDAAKANLNYIGLDGNIGCLVNGAGLAMATMDIIKLHGGTPANFLDVGGGATVHQVTEAFKLITSDKKVLAILVNIFGGIMRCDVIAQGIVMAVKDLEIKIPVVVRLQGTRVDDAKALIADSGLKILACDDLDEAARMVVKLSEIVTLAKQAHVDVKFQLPI

SEQ ID NO: 339 - protein, 426 aa, Homo sapiens; identical to SEQ ID NO: 338

SEQ ID NO: 340 - protein, 404 aa, Homo sapiens
AVQLTSRRWLNLQEYQSKKLMSDNGVRVQRFFVADTANEALEAAKRLNAKEIVLKAQILAGGRGKGVFNSGLKGGVHLTKDPNVVGQLAKQMIGYNLATKQTPKEGVKVNKVMVAEALDISRETYLAILMDRSCNGPVLVGSPQGRSDIEEVAASNPELIFKEQIDIFEGIKDSQAQRMAENLGFVGPLKSQAADQITKLYNLFLKIDATQVEVNPFGETPEGQVVCFDAKINFDDNAEFRQKDIFAMDDKSENEPIENEAAKYDLKYIGLDGNIACFVNGAGLAMATCDIIFLNGGKPANFLDLGGGVKEAQVYQAFKLLTADPKVEAILVNIFGGIVNCAIIANGITKACRELELKVPLVVRLEGTNVQEAQKILNNSGLPITSAIDLEDAAKKAVASVAKK

SEQ ID NO: 341 - protein, 504 aa, Homo sapiens [sequence omitted]

SEQ ID NO: 342 - protein, 945 aa, Homo sapiens
ASDRAEGRPAKPSKTAAREKTEGAVAAVGGGPSSFRCCYGCCHEARLGRTSLPRGVIMLTEASLSIWGWGSLGIVLFLITFGPFVIFYLTFYILCFVGGGLVVTLLFGKTNSEKYLEQCEHSFLPPTSPGVPKCLEEMKREARTIKIDRRLTGANIIDEPLQQVIQFSLRDYVQYWYYTLSDDESFLLEIRQTLQNALIQFATRSKEIDWQPYFTTRIVDDFGTHLRVFRKAQQKITEKDDQVKGTAEDLVDTFFEVEVEMEKEVCRDLVCTSPKDEEGFLRDLCEVLLYLLLPPGDFQNKIMRYFVREILARGILLPLINQLSDPDYINQYVIWMIRDSNCNYEAFMNIIKLSDNIGELEAVRDKAAEELQYLRSLDTAGDDINTIKNQINSLLFVKKVCDSRIQRLQSGKEINTVKLAANFGKLCTVPLDSILVDNVALQFFMDYMQQTGGQAHLFFWMTVEGYRVTAQQQLEVLLSRQRDGKHQTNQTKGLLRAAAVGIYEQYLSEKASPRVTVDDYLVAKLADTLNHEDPTPEIFDDIQRKVYELMLRDERFYPSFRQNALYVRMLAELDMLKDPSFRGSDDGDGESFNGSPTGSINLSLDDLSNVSSDDSVQLHAYISDTVYADYDPYAVAGVCNDHGKTYALYAITVHRRNLNSEEMWKTYRRYSDFHDFHMRITEQFESLSSILKLPEKKTFNNMDRDFLEKRKKDLNAYLQLLLAPEMMKASPALAHYVYDFLENKAYSKGKGDFARKMDTFVNPLRNSMRNVSNAVKSLPDSLAEGMTKMSDNMGKMSERLGQDIKQSFFKVPPLIPKTDSDPEHRRVSAQLDDNVDDNIPLRVMLLLMDEVFDLKERNQWLRRNIKNLLQQLIRATYGDTINRKIVDHVDWMTSPEQVADSVKRFRDAFWPNGILAEAVPCRDKSIRMRTRVAGKTKLLAIMPGE

SEQ ID NO: 343 - protein, 1319 aa, Homo sapiens
SCQSRSPWPPRPEVRAPAKGPRGVAGAAGACSAGARLGDAAGGDPASGQAARGCGARAPRGLGRTARARDTAMEDAGAAGPGPEPEPEPEPEPEPAPEPEPEPKPGAGTSEAFSRLWTDVMGILDGSLGNIDDLAQQYADYYNTCFSDVCERMEELRKRRVSQDLEVEKPDASPTSLQLRSQIEESLGFCSAVSTPEVERKNPLHKSNSEDSSVGKGDWKKKNKYFWQNFRKNQKGIMRQTSKGEDVGYVASEITMSDEERIQLMMMVKEKMITIEEALARLKEYEAQHRQSAALDPADWPDGSYPTFDGSSNCNSREQSDDETEESVKFKRLHKLVNSTRRVRKKLIRVEEMKKPSTEGGEEHVFENSPVLDERSALYSGVHKKPLFFDGSPEKPPEDDSDSLTTSPSSSSLDTWGAGRKLVKTFSKGESRGLIKPPKKMGTFFSYPEEEKAQKVSRSLTEGEMKKGLGSLSHGRTCSFGGFDLTNRSLHVGSNNSDPMGKEGDFVYKEVIKSPTASRISLGKKVKSVKETMRKRMSKKYSSSVSEQDSGLDGMPGSPPPSQPDPEHLDKPKLKAGGSVESLRSSLSGQSSMSGQTVSTTDSSTSNRESVKSEDGDDEEPPYRGPFCGRARVHTDFTPSPYDTDSLKLKKGDIIDIISKPPMGTWMGLLNNKVGTFKFIYVDVLSEDEEKPKRPTRRRRKGRPPQPKSVEDLLDRINLKEHMPTFLFNGYEDLDTFKLLEEEDLDELNIRDPEHRAVLLTAVELLQEYDSNSDQSGSQEKLLVDSQGLSGCSPRDSGCYESSENLENGKTRKASLLSAKSSTEPSLKSFSRNQLGNYPTLPLMKSGDALKQGQEEGRLGGGLAPDTSKSCDPPGVTGLNKNRRSLPVSICRSCETLEGPQTVDTWPRSHSLDDLQVEPGAEQDVPTEVTEPPPQIVPEVPQKTTASSTKAQPLERDSAVDNALLLTQSKRFSEPQKLTTKKLEGSIAASGRGLSPPQCLPRNYDAQPPGAKHGLARTPLEGHRKGHEFEGTHHPLGTKEGVDAEQRMQPKIPSQPPPVPAKKSRERLANGLHPVPMGPSGALPSPDAPCLPVKRGSPASPTSPSDCPPALAPRPLSGQAPGSPPSTRPPPWLSELPENTSLQEHGVKLGPALTRKVSCARGVDLETLTENKLHAEGIDLTEEPYSDKHGRCGIPEALVQRYAEDLDQPERDVAANMDQIRVKQLRKQHRMAIPSGGLTEICRKPVSPGCISSVSDWLISIGLPMYAGTLSTAGFSTLSQVPSLSHTCLQEAGITEERHIRKLLSAARLFKLPPGPEAM

SEQ ID NO: 344 - protein, 198 aa, Homo sapiens
MEGGLGRAVCLLTGASRGFGRTLAPLLASLLSPGSVLVLSARNDEALRQLEAELGAERSGLRVVRVPADLGAEAGLQQLLGALRELPRPKGLQRLLLINNAGSLGDVSKGFVDLSDSTQVNNYWALNLTSMLCLTSSVLKAFPDSPGLNRTVVNISSLCALQPFKGWALYCAGKAARDMLFQVLALEEPNVRVLNYAP

SEQ ID NO: 345 - protein, 224 aa, Homo sapiens
IIGGRESRPHSRPYMAYLQIQSPAGQSRCGGFLVREDFVLTAAHCWGSNINVTLGAHNIQRRENTQQHITARRAIRHPQYNQRTIQNDIMLLQLSRRVRRNRNVNPVALPRAQEGLRPGTLCTVAGWGRVSMRRGTDTLREVQLRVQRDRQCLRIFGSYDPRRQICVGDRRERKAAFKGDSGGPLLCNNVAHGIVSYGKSSGVPPEVFTRVSSFLPWIRTTMRS

SEQ ID NO: 346 - protein, 54 aa, Homo sapiens
SRGQRRKVAQENPKMHNSKISKRLGAEWKLLSEAEKRPYIDEAKRLRAQHMNAA

SEQ ID NO: 347 - protein, 352 aa, Homo sapiens [sequence omitted]

SEQ ID NO: 348 - protein, 99 aa, Homo sapiens
  VARIANT 94: Xaa = Any Amino Acid
AGQAFRKFLPLFDRVLVERSAAETVTKGGIMLPEKSQGKVLQATVVAVGSGSKGKGGEIQPVSVKVGDKVLLPEYGGTKVVLDDKDYFLFRDGXILGKY

SEQ ID NO: 349 - protein, 545 aa, Homo sapiens
SPGLEYNVSVYTVKDDKENSPVQEFTVPGSKSTATISGLKPGVDYTITVYAVTGRGDSPASSKPISINYRTEIDKPSQMQVTDVQDNSISVKWLPSSSPVTGYRVTTTPKNGPGPTKTKTAGPDQTEMTIEGLQPTVEYVVSVYAQNPSGESQPLVQTAVTTIPAPTDLKFTQVTPTSLSAQWTPPNVQLTGYRVRVTPKEKTGPMKEINLAPDSSSVVVSGLMVATKYEVSVYALKDTLTSRPAQGVVTTLENVSPPRRARVTDATETTITISWRTKTETITGFQVDAVPANGQTPIQRTIKPDVRSYTITGLQPGTDYKIYLYTLNDNARSSPVVIDASTAIDAPSNLRFLATTPNSLLVSWQPPRARITGYIIKYEKPGSPPREVVPRPRPGVTEATITGLEPGTEYTIYVIALKNNQKSEPLIGRKKTVQKTPFVTHPGYDTGNGIQLPGTSGQQPSVGQQMIFEEHGFRRTTPPTTATPIRHRPRPYPPNVGQEALSQTTISWAPFQDTSEYIISCHPVGTDEEPLQFRVPGTSTSATLT

SEQ ID NO: 350 - protein, 268 aa, Homo sapiens
GLARLRQQDPGAIQRDGLDLARSHRGQQAPGHYPHRGETHPDLQAERPRHLRLGDPGPPAGGRRVRQVQCALRELHQPHSAQQDRQLGPAGSLRLIQAAPADAAASAALQPHLLVPQPYHGGGRQGAHATRGACHPRFGGHAAHLALLALRHRHPGHPLHHRPSERQLPLPQPQGGGVEQPGPQQLPRRRPARGERVGEGSPGAGSQVRSGTKWSPSCGQFCVSIQHGSLPYPSPSVALHDLQCCSFWLCCWTWVATCWGHLIVSPQL

SEQ ID NO: 351 - protein, 383 aa, Homo sapiens [sequence omitted]

SEQ ID NO: 352 - protein, 548 aa, Homo sapiens
MVAHDETGGLLPIKRTIRVLDVNNQSFREQEEPSNKRVRPLARVTSLANLISPVRNGAVRRFGQTIQSFTLRGDHRSPASAQKFSSRSTVPTPAKRRSSALWSEMLDITMKESLTTREIRRQEAIYEMSRGEQDLIEDLKLARKAYHDPMLKLSIMSEEELTHIFGDLDSYIPLHEDLLTRIGEATKPDGTVEQIGHILVSWLPRLNAYRGYCSNQLAAKALLDQKKQDPRVQDFLQRCLESPFSRKLDLWSFLDIPRSRLVKYPLLLKEILKHTPKEHPDVQLLEDAILIIQGVLSDINLKKGESECQYYIDKLEYLDEKQRDPRIEASKVLLCHGELRSKSGHKLYIFLFQDILVLTRPVTRNERHSYQVYRQPIPVQELVLEDLQDGDVRMGGSFRGAFSNSEKAKNIFRIRFHDPSPAQSHTLQANDVFHKQQWFNCIRAAIAPFQSAGSPPELQGLPELHEECEGNHPSARKLTAQRRASTVSSVTQVEVDENAYRCGSGMQMAEDSKSLKTHQTQPGIRRARDKALLVANGKRLWCREGSVC

SEQ ID NO: 353 - protein, 226 aa, Homo sapiens
IIGGTESKPHSRPYMAYLEIVTSNGPSKFCGGFLIRRNFVLTAAHCAGRSITVTLGAHNITEEEDTWQKLEVIKQFRHPKYNTSTLHHDIMLLKLKEKASLTLAVGTLPFPSQFNFVPPGRMCRVAGWGRTGVLKPGSDTLQEVKLRLMDPQACSHFRDFDHNLQLCVGNPRKTKSAFKGDSGGPLLCAGVAQGIVSYGRSDAKPPAVFTRISHYRPWINQILQAN

SEQ ID NO: 354 - protein, 3859 aa, Homo sapiens [sequence omitted]

SEQ ID NO: 355 - protein, 134 aa, Homo sapiens
MFRRPVLQVLRQFVRHESETTTSLVLERSLNRVHLLGRVGQDPVLRQVEGKNPVTIFSLATNEMWRSGDSEVYQLGDVSQKTTWHRISVFRPGLRDVAYQYVKKGSRIYLEGKIDYGEYMDKNNVRRQATTIIA

SEQ ID NO: 356 - protein, 230 aa, Homo sapiens
MTPGTQSPFFLLLLLTVLTVVTGSGHASSTPGGEKETSATQRSSVPSSTEKNAIPAPTTTKSCRETFLKWPGSVVVQLTLAFREGTINVHDVETQFNQYKTEAASRYNLTISDVSVSDVPFPFSAQSGAGVPGWGIALLVLVCVLVALAIVYLIALAVCQCRRKNYGQLDIFPARDTYHPMSEYPTYHTHGRYVPPSSTDRSPYEKVSAGNGGSSLSYTNPAVAATSANL

SEQ ID NO: 357 - protein, 785 aa, Homo sapiens
MPGVIPSESNGLSRGSPSKKNRLSLKFFQKKETKRALDFTDSQENEEKASEYRASEIDQVVPAAQSSPINCEKRENLLPFVGLNNLGNTCYLNSILQVLYFCPGFKSGVKHLFNIISRKKEALKDEANQKDKGNCKEDSLASYELICSLQSLIISVEQLQASFLLNPEKYTDELATQPRRLLNTLRELNPMYEGYLQHDAQEVLQCILGNIQETCQLLKKEEVKNVAELPTKVEEIPHPKEEMNGINSIEMDSMRHSEDFKEKLPKGNGKRKSDTEFGNMKKKVKLSKEHQSLEENQRQTRSKRKATSDTLESPPKIIPKYISENESPRPSQKKSRVKINWLKSATKQPSILSKFCSLGKITTNQGVKGQSKENECDPEEDLGKCESDNTTNGCGLESPGNTVTPVNVNEVKPINKGEEQIGFELVEKLFQGQLVLRTRCLECESLTERREDFQDISVPVQEDELSKVEESSEISPEPKTEMKTLRWAISQFASVERIVGEDKYFCENCHHYTEAERSLLFDKMPEVITIHLKCFAASGLEFDCYGGGLSKINTPLLTPLKLSLEEWSTKPTNDSYGLFAVVMHSGITISSGHYTASVKVTDLNSLELDKGNFVVDQMCEMGKPEPLNEEEARGVVENYNDEEVSIRVGGNTQPSKVLNKKNVEAIGLLGGQKSKADYELYNKASNPDKVASTAFAENRNSETSDTTGTHESDRNKESSDQTGINISGFENKISYVVQSLKEYEGKWLLFDDSEVKVTEEKDFLNSLSPSTSPTSTPYLLFYKKL

SEQ ID NO: 358 - protein, 113 aa, Homo sapiens
ITLVSAAPGKVICEMKVEEEHTNAIGTLHGGLTATLVDNISTMALLCTERGAPGVSVDMNITYMSPAKLGEDIVITAHVLKQGKTLAFTSVDLTNKATGKLIAQGRHTKHLGN

SEQ ID NO: 359 - protein, 888 aa, Homo sapiens
KKAITCGEKEKQDLIKSLAMLKDGFRTDRGSHSDLWSSSSSLESSSFPLPKQYLDVSSQTDISGSFGINSNNQLAEKVRLRLRYEEAKRRIANLKIQLAKLDSEAWPGVLDSERDRLILINEKEELLKEMRFISPRKWTQGEVEQLEMARKRLEKDLQAARDTQSKALTERLKLNSKRNQLVRELEEATRQVATLHSQLKSLSSSMQSLSSGSSPGSLTSSRGSLVASSLDSSTSASFTDLYYDPFEQLDSELQSKVEFLLLEGATGFRPSGCITTIHEDEVAKTQKAEGGGRLQALRSLSGTPKSMTSLSPRSSLSSPSPPCSPLMADPLLAGDAFLNSLEFEDPELSATLCELSLGNSAQERYRLEEPGTEGKQLGQAVNTAQGCGLKVACVSAAVSDESVAGDSGVYEASVQRLGASEAAAFDSDESEAVGATRIQIALKYDEKNKQFAILIIQLSNLSALLQQQDQKVNIRVAVLPCSESTTCLFRTRPLDASDTLVFNEVFWVSMSYPALHQKTLRVDVCTTDRSHLEECLGGAQISLAEVCRSGERSTRWYNLLSYKYLKKQSRELKPVGVMAPASGPASTDAVSALLEQTAVELEKRQEGRSSTQTLEDSWRYEETSENEAVAEEEEEEVEEEEGEEDVFTEKASPDMDGYPALKVDKETNTETPAPSPTVVRPKDRRVGTPSQGPFLRGSTIIRSKTFSPGPQSQYVCRLNRSDSDSSTLSKKPPFVRNSLERRSVRMKRPSSVKSLRSERLIRTSLDLELDLQATRTWHSQLTQEISVLKELKEQLEQAKSHGEKELPQWLREDERFRLLLRMLEKRMDRAEHKGELQTDKMMRAAAKDVHRLRGQSCKEPPEVQSFREKMAFFTRPRMNIPALSADDV

SEQ ID NO: 360 - protein, 580 aa, Homo sapiens
PLVINTLKRFNLYPEVILASWYRIYTKIMDLIGIQTKICWTVTRGEGLSPIESCEGLGDPACFYVAVIFILNGLMMALFFIYGTYLSGSRLGGLVTVLCFFFNHGECTRVMWTPPLRESFSYPFLVLQMLLVTHILRATKLYRGSLIALCISNVFFMLPWQFAQFVLLTQIASLFAVYVVGYIDICKLRKIIYIHMISLALCFVLMFGNSMLLTSYYASSLVIIWGILAMKPHFLKINVSELSLWVIQGCFWLFGTVILKYLTSKIFGIADDAHIGNLLTSKFFSYKDFDTLLYTCAAEFDFMEKETPLRYTKTLLLPVVLVVFVAIVRKIISDMWGVLAKQQTHVRKHQFDHGELVYHALQLLAYTALGILIMRLKLFLTPHMCVMASLICSRQLFGWLFCKVHPGAIVFAILAAMSIQGSANLQTQWNIVGEFSNLPQEELIEWIKYSTKPDAVFAGAMPTMASVKLSALRPIVNHPHYEDAGLRARTKIVYSMYSRKAAEEVKRELIKLKVNYYILEESWCVRRSKPGCSMPEIWDVEDPANAGKTPLCNLLVKDSKPHFTTVFQNSVYKVLEVVKE

SEQ ID NO: 361 - protein, 506 aa, Homo sapiens
AMGRVVAELVSSLLGLWLLLCSCGCPEGAELRAPPDKIAIIGAGIGGTSAAYYLRQKFGKDVKIDLFEREEVGGRLATMMVQGQEYEAGGSVIHPLNLHMKRFVKDLGLSAVQASGGLLGIYNGETLVFEESNWFIINVIKLVWRYGFQFLRMHMWVEDVLDKFMRIYRYQSHDYAFSSVEKLLHALGGDDFLGMLNRTLLETLQKAGFSEKFLNEMIAPVMRVNYGQSTDINAFVGAVSLSCSDSGLWAVEGGNKLVCSGLLQASKSNLISGSVMYIEEKTKTKYTGNPTKMYEVVYQIGTETRSDFYDIVLVATPLNRKMSNITFLNFDPPIEEFHQYYQHIVTTLVKGELNTSIFSSRPIDKFGLNTVLTTDNSDLFINSIGIVPSVREKEDPEPSTDGTYVWKIFSQETLTKAQILKLFLSYDYAVKKPWLAYPHYKPPEKCPSIILHDRLYYLNGIECAASAMEMSAIAAHNAALLAYHRWNGHTDMIDQDGLYEKLKTEL

SEQ ID NO: 362 - protein, 30 aa, Homo sapiens
MRPRLWLLLAAQLTGRRRRARLRFMKQFYK

SEQ ID NO: 363 - protein, 362 aa, Homo sapiens
MRRPSLLLKDILKCTLLVFGVWILYILKLNYTTEECDMKKMHYVDPDHVKRAQKYAQQVLQKECRPKFAKTSMALLFEHRYSVDLLPFVQKAPKDSEAESKYDPPFGFRKFSSKVQTLLELLPEHDLPEHLKAKTCRRCVVIGSGGILHGLELGHTLNQFDVVIRLNSAPVEGYSEHVGNKTTIRMTYPEGAPLSDLEYYSNDLFVAVLFKSVDFNWLQAMVKKETLPFWVRLFFWKQVAEKIPLQPKHFRILNPVIIKETAFDILQYSEPQSRFWGRDKNVPTIGVIAVVLATHLCDEVSLAGFGYDLNQPRTPLHYFDSQCMAAMNFQTMHNVTTETKFLLKLVKEGVVKDLSGGIDREF

SEQ ID NO: 364 - protein, 80 aa, Homo sapiens
LEPLAEDILHQSPNMNAVISLQKIIEIQKLLVSLWKRSQPCEVPSPPLIFPVCDIIVYPPTPVPSDMSCLLPGWHRFNGT

SEQ ID NO: 365 - protein, 209 aa, Homo sapiens
MGNGKSIAGDQKAVPTQETHVWYRTFMMEYPSGLQTLHEFKTLLGLQGLNQKANKHIDQVYNTFDTNKDGFIDFLEFIAAVNLIMQEKMEQKLKWYFKLYDADGNGSIDKNELLDMFMAVQALNGQQTLSPEEFINLVFHKIDINNDGELTLEEFINGMAKDQDLLEIVYKSFDFSNVLRVICNGKQPDMETDSSKSPDKAGLGKVKMK

SEQ ID NO: 366 - protein, 199 aa, Homo sapiens
KIDATQVEVNPFGETPEGQVVCFDAKINFDDNAEFRQKDIFAMDDKSENEPIENEAAKYDLKYIGLDGNIACFVNGAGLAMATCDIIFLNGGKPANFLDLGGGVKEAQVYQAFKLLTADPKVEAILVNIFGGIVNCAIIANGITKACRELELKVPLVVRLEGTNVQEAQKILNNSGLPITSAIDLEDAAKKAVASVAKK

SEQ ID NO: 367 - protein, 190 aa, Homo sapiens
MKHVKKEKAEKLEKERQRHIGKPLLGGPFSLTTHTGERKTDKDYLGQWLLIYFGFTHCPDVCPEELEKMIQVVDEIDSITTLPDLTPLFISIDPERDTKEAIANYVKEFSPKLVGLTGTREEVDQVARAYRVYYSPGPKDEDEDYIVDHTIIMYLIGPDGEFLDYFGQNKRKGEIAASIATHMRPYRKKS

SEQ ID NO: 368 - protein, 718 aa, Homo sapiens
MEDLGENTMVLSTLRSLNNFISQRVEGGSGLDISTSAPGSLQMQYQQSMQLEERAEQIRSKSHLIQVEREKMQMELSHKRARVELERAASTSARNYEREVDRNQELLTRIRQLQEREAGAEEKMQEQLERNRQCQQNLDAASKRLREKEDSLAQAGETINALKGRISELQWSVMDQEMRVKRLESEKQELQEQLDLQHKKCQEANQKIQELQASQEARADHEQQIKDLEQKLSLQEQDAAIVKNMKSELVRLPRLERELKQLREESAHLREMRETNGLLQEELEGLQRKLGRQEKMQETLVGLELENERLLAKLQSWERLDQTMGLSIRTPEDLSRFVVELQQRELALKDKNSAVTSSARGLEKARQQLQEELRQVSGQLLEERKKRETHEALARRLQKRVLLLTKERDGMRAILGSYDSELTPAEYSPQLTRRMREAEDMVQKVHSHSAEMEAQLSQALEELGGQKQRADMLEMELKMLKSQSSSAEQSFLFSREEADTLRLKVEELEGERSRLEEEKRMLEAQLERRALQGDYDQSRTKVLHMSLNPTSVARQRLREDHSQLQAECERLRGLLRAMERGGTVPADLEAAAASLPSSKEVAELKKQVESAELKNQRLKEVFQTKIQEFRKACYTLTGYQIDITTENQYRLTSLYAEHPGDCLIFKATSPSGSKMQLLETEFSHTVGELIEVHLRRQDSIPAFLSSLTLELFSRQTVA

SEQ ID NO: 369 - protein, 310 aa, Homo sapiens
MREWDGVFQNEVEKGEISSVKNHDGEDNIIAWISFRMFGPGREYNFTRPNEKGEYEIAEGISATVFRTVLDYYKTGIINCPDGISIPDLRDTCDYLCINFDFNTIRCQDLSALLHELSNDGAHKQFDHYLEELILPIMVGCAKKGERECHIVVLTDEDSVDWDEDHPPPMGEEYSQILYSSKLYRFFKYIENRDVAKTVLKERGLKNIRIGIEGYPTCKEKIKRRPGGRSEVIYNYVQRPFIQMSWEKEEGKSRHVDFQCVRSKSLTNLVAAGDDVLEDQEILMHHPPQVDELDRLNAPLSQMASNDFQD

SEQ ID NO: 370 - protein, 681 aa, Homo sapiens
MGSPVHRVSLGDTWSRQMHPDIESERYMQSFDVERLTNILDGGAQNTALRRKVESIIHSYPEFSCKDNYFMTQNERYKAAMRRAFHIRLIARRLGWLEDGRELGYAYRALSGDVALNIHRVFVRALRSLGSEEQIAKWDPLCKNIQIIATYAQTELGHGTYLQGLETEATYDAATQEFVIHSPTLTATKWWPGDLGRSATHALVQAQLICSGARRGMHAFIVPIRSLQDHTPLPGIIIGDIGPKMDFDQTDNGFLQLNHVRVPRENMLSRFAQVLPDGTYVKLGTAQSNYLPMVVVRVELLSGEILPILQKACVIAMRYSVIRRQSRLRPSDPEAKVLDYQTQQQKLFPQLAISYAFHFLAVSLLEFFQHSYTAILNQDFSFLPELHALSTGMKAMMSEFCTQGAEMCRRACGGHGYSKLSGLPSLVTKLSASCTYEGENTVLYLQVARFLVKSYLQTQMSPGSTPQRSLSPSVAYLTAPDLARCPAQRAADFLCPELYTTAWAHVAVRLIKDSVQHLQTLTQSGADQHEAWNQTTVIHLQAAKVHCYYVTVKGFTEALEKLENEPAIQQVLKRLCDLHAIHGILTNSGDFLHDAFLSGAQVDMARTAYLDLLRLIRKDAILLTDAFDFTDQCLNSALGCYDGNVYERLFQWAQKSPTNTQENPAYEEYIRPLLQSWRSKL

SEQ ID NO: 371 - protein, 461 aa, Homo sapiens
MASPALAAALAVAAAAGPNASGAGERGSGGVANASGASWGPPRGQYSAGAVAGLAAVVGFLIVFTVVGNVLVVIAVLTSRALRAPQNLFLVSLASADILVATLVMPFSLANELMAYWYFGQVWCGVYLALDVLFCTSSIVHLCAISLDRYWSVTQAVEYNLKRTPRRVKATIVAVWLISAVISFPPLVSLYRQPDGAAYPQCGLNDETWYILSSCIGSFFAPCLIMGLVYARIYRVAKRRTRTLSEKRAPVGPDGASPTTENGLGAAAGEARTGTARPRPPTWSRTRAAQRPRGGAPGPLRRGGRRRAGAEGGAGGADGQGAGPGAAQSGALTASRSPGPGGRLSRASSRSVEFFLSRRRRARSSVCRRKVAQAREKRFTFVLAVVMGVFVLCWFPFFFIYSLYGICREACQVPGPLFKFFFWIGYCNSSLNPVIYTVFNQDFRPSFKHILFRRRRRGFRQ

SEQ ID NO: 372 - protein, 194 aa, Homo sapiens
MEEKLKKTKIIFVVGGPGSGKGTQCEKIVQKYGYTHLSTGDLLRSEVSSGSARGKKLSEIMEKGQLVPLETVLDMLRDAMVAKVNTSKGFLIDGYPREVQQGEEFERRIGQPTLLLYVDAGPETMTQRLLKRGETSGRVDDNEETIKKRLETYYKATEPVIAFYEKRGIVRKVNAEGSVDSVFSQVCTHLDALK

SEQ ID NO: 373 - protein, 239 aa, Homo sapiens
MAPSVPAAEPEYPKGIRAVLLGPPGAGKGTQAPRLAENFCVCHLATGDMLRAMVASGSELGKKLKATMDAGKLVSDEMVVELIEKNLETPLCKNGFLLDGFPRTVRQAEMLDDLMEKRKEKLDSVIEFSIPDSLLIRRITGRLIHPKSGRSYHEEFNPPKEPMKDDITGEPLIRRSDDNEKALKIRLQAYHTQTTPLIEYYRKRGIHSAIDASQTPDVVFASILAAFSKATCKDLVMFI

SEQ ID NO: 374 - protein, 297 aa, Homo sapiens
MGDHAWSFLKDFLAGAVAAAVSKTAVAPIERVKLLLQVQHASKQISAEKQYKGIIDCVVRIPKEQGFLSFWRGNLANVIRYFPTQALNFAFKDKYKQLFLGGVDRHKQFWRYFAGNLASGGAAGATSLCFVYPLDFARTRLAADVGRRAQREFHGLGDCIIKIFKSDGLRGLYQGFNVSVQGIIIYRAAYFGVYDTAKGMLPDPKNVHIFVSWMIAQSVTAVAGLLSYPFDTVRRRMMMQSGRKGADIMYTGTVDCWRKIAKDEGAKAFFKGAWSNVLRGMGGAFVLVLYDEIKKYV

SEQ ID NO: 375 - protein, 346 aa, Homo sapiens
MAMVSEFLKQAWFIENEEQEYVQTVKSSKGGPGSAVSPYPTFNPSSDVAALHKAIMVKGVDEATIIDILTKRNNAQRQQIKAAYLQETGKPLDETLKKALTGHLEEVVLALLKTPAQFDADELRAAMKGLGTDEDTLIEILASRTNKEIRDINRVYREELKRDLAKDITSDTSGDFRNALLSLAKGDRSEDFGVNEDLADSDARALYEAGERRKGTDVNVFNTILTTRSYPQLRRVFQKYTKYSKHDMNKVLDLELKGDIEKCLTAIVKCATSKPAFFAEKLHQAMKGVGTRHKALIRIMVSRSEIDMNDIKAFYQKMYGISLCQAILDETKGDYEKILVALCGGN

SEQ ID NO: 376 - protein, 320 aa, Homo sapiens
MAQVLRGTVTDFPGFDERADAETLRKAMKGLGTDEESILTLLTSRSNAQRQEISAAFKTLFGRDLLDDLKSELTGKFEKLIVALMKPSRLYDAYELKHALKGAGTNEKVLTEIIASRTPEELRAIKQVYEEEYGSSLEDDVVGDTSGYYQRMLVVLLQANRDPDAGIDEAQVEQDAQALFQAGELKWGTDEEKFITIFGTRSVSHLRKVFDKYMTISGFQIEETIDRETSGNLEQLLLAVVKSIRSIPAYLAETLYYAMKGAGTDDHTLIRVMVSRSEIDLFNIRKEFRKNFATSLYSMIKGDTSGDYKKALLLLCGEDD

SEQ ID NO: 377 - protein, 466 aa, Homo sapiens
MSYPGYPPTGYPPFPGYPPAGQESSFPPSGQYPYPSGFPPMGGGAYPQVPSSGYPGAGGYPAPGGYPAPGGYPGAPQPGGAPSYPGVPPGQGFGVPPGGAGFSGYPQPPSQSYGGGPAQVPLPGGFPGGQMPSQYPGGQPTYPSQPATVTQVTQGTIRPAANFDAIRDAEILRKAMKGFGTDEQAIVDVVANRSNDQRQKIKAAFKTSYGKDLIKDLKSELSGNMEELILALFMPPTYYDAWSLRKAMQGAGTQERVLIEILCTRTNQEIREIVRCYQSEFGRDLEKDIRSDTSGHFERLLVSMCQGNRDENQSINHQMAQEDAQRLYQAGEGRLGTDESCFNMILATRSFPQLRATMEAYSRMANRDLLSSVSREFSGYVESGLKTILQCALNRPAFFAERLYYAMKGAGTDDSTLVRIVVTRSEIDLVQIKQMFAQMYQKTLGTMIAGDTSGDYRRLLLAIVGQ

SEQ ID NO: 378 - protein, 181 aa, Homo sapiens
MGNIFANLFKGLFGKKEMRILMVGLDAAGKTTILYKLKLGEIVTTIPTIGFNVETVEYKNISFTVWDVGGQDKIRPLWRHYFQNTQGLIFVVDSNDRERVNEAREELMRMLAEDELRDAVLLVFANKQDLPNAMNAAEITDKLGLHSLRHRNWYIQATCATSGDGLYEGLDWLSNQLRNQK

SEQ ID NO: 379 - protein, 1013 aa, Homo sapiens
MGDKKDDKDSPKKNKGKERRDLDDLKKEVAMTEHKMSVEEVCRKYNTDCVQGLTHSKAQEILARDGPNALTPPPTTPEWVKFCRQLFGGFSILLWIGAILCFLAYGIQAGTEDDPSGDNLYLGIVLAAVVIITGCFSYYQEAKSSKIMESFKNMVPQQALVIREGEKMQVNAEEVVVGDLVEIKGGDRVPADLRIISAHGCKVDNSSLTGESEPQTRSPDCTHDNPLETRNITFFSTNCVEGTARGVVVATGDRTVMGRIATLASGLEVGKTPIAIEIEHFIQLITGVAVFLGVSFFILSLILGYTWLEAVIFLIGIIVANVPEGLLATVTVCLTVTAKRMARKNCLVKNLEAVETLGSTSTICSDKTGTLTQNRMTVAHMWFDNQIHEADTTEDQSGTSFDKSSHTWVALSHIAGLCNRAVFKGGQDNIPVLKRDVAGDASESALLKCIELSSGSVKLMRERNKKVAEIPFNSTNKYQLSIHETEDPNDNRYLLVMKGAPERILDRCSTILLQGKEQPLDEEMKEAFQNAYLELGGLGERVLGFCHYYLPEEQYPQGFAFDCDDVNFTTDNLCFVPLMSMIGPPRAAVPDAVGKCRSAGIKVIMVTGDHPITAKAIAKGVGIISEGNETVEDIAARLNIPVSQVNPRDAKACVIHGTDLKDFTSEQIDEILQNHTEIVFARTSPQQKLIIVEGCQRQGAIVAVTGDGVNDSPALKKADIGVAMGIAGSDVSKQAADMILLDDNFASIVTGVEEGRLIFDNLKKSIAYTLTSNIPEITPFLLFIMANIPLPLGTITILCIDLGTDMVPAISLAYEAAESDIMKRQPRNPRTDKLVNERLISMAYGQIGMIQALGGFFSYFVILAENGFLPGNLVGIRLNWDDRTVNDLEDSYGQQWTYEQRKVVEFTCHTAFFVSIVVVQWADLIICKTRRNSVFQQGMKNKILIFGLFEETALAAFLSYCPGMDVALRMYPLKPSWWFCAFPYSFLIFVYDEIRKLILRRNPGGSVEKETYY

SEQ ID NO: 380 - protein, 168 aa, Homo sapiens
MLPAALLRRPGLGRLVRHARAYAEAAAAPAAASGPNQMSFTFASPTQVFFNGANVRQVDVPTLTGAFGILAAHVPTLQVLRPGLVVVHAEDGTTSKYFVSSGSIAVNADSSVQLLAEEAVTLDMLDLGAAKANLEKAQAELVGTADEATRAEIQIRIEANEALVKALE

SEQ ID NO: 381 - protein, 213 aa, Homo sapiens
MAAPAVSGLSRQVRCFSTSVVRPFAKLVRPPVQVYGIEGRYATALYSAASKQNKLEQVEKELLRVAQILKEPKVAASVLNPYVKRSIKVKSLNDITAKERFSPLTTNLINLLAENGRLSNTQGVVSAFSTMMSVHRGEVPCTVTSASPLEEATLSELKTVLKSFLSQGQVLKLEAKTDPSILGGMIVRIGEKYVDMSVKTKIQKLGRAMREIV

SEQ ID NO: 382 - protein, 339 aa, Homo sapiens
MAAAVAAAPGALGSLHAGGARLVAACSAWLCPGLRLPGSLAGRRAGPAIWAQGWVPAAGGPAPKRGYSSEMKTEDELRVRHLEEENRGIVVLGINRAYGKNSLSKNLIKMLSKAVDALKSDKKVRTIIIRSEVPGIFCAGADLKERAKMSSSEVGPFVSKIRAVINDIANLPVPTIAAIDGLALGGGLELALACDIRVAASSAKMGLVETKLAIIPGGGGTQRLPRAIGMSLAKELIFSARVLDGKEAKAVGLISHVLEQNQEGDAAYRKALDLAREFLPQGPVAMRVAKLAINQGMEVDLVTGLAIEEACYAQTIPTKDRLEGLLAFKEKRPPRYKGE

SEQ ID NO: 383 - protein, 418 aa, Homo sapiens
MRLSAGPDAGPSGNSSPWWPLATGAGNTSREAEALGEGNGPPRDVRNEELAKLEIAVLAVTFAVAVLGNSSVLLALHRTPRKTSRMHLFIRHLSLADLAVAFFQVLPQMCWDITYRFRGPDWLCRVVKHLQVFGMFASAYMLVVMTADRYIAVCHPLKTLQQPARRSRLMIAAAWVLSFVLSTPQYFVFSMIEVNNVTKARDCWATFIQPWGSRAYVTWMTGGIFVAPVVILGTCYGFICYNIWCNVRGKTASRQSKGAEQAGVAFQKGFLLAPCVSSVKSISRAKIRTVKMTFVIVTAYIVCWAPFFIIQMWSVWDPMSVWTESENPTITITALLGSLNSCCNPWIYMFFSGHLLQDCVQSFPCCQNMKEKFNKEDTDSMSRRQTFYSNNRSPTNSTGMWKDSPKSSKSIKFIPVST

SEQ ID NO: 384 - protein, 233 aa, Homo sapiens
MEPTAPSLTEEDLTEVKKDALENLRVYLCEKIIAERHFDHLRAKKILSREDTEEISCRTSSRKRAGKLLDYLQENPKGLDTLVESIRREKTQNFLIQKITDEVLKLRNIKLEHLKGLKCSSCEPFPDGATNNLSRSNSDESNFSEKLRASTVMYHPEGESSTTPFFSTNSSLNLPVLEVGRTENTIFSSTTLPRPGDPGAPPLPPDLQLEEEGTCANSSEMFLPLRSRTVSRQ

SEQ ID NO: 385 - protein, 206 aa, Homo sapiens
MAVKKIAIFGATGQTGLTTLAQAVQAGYEVTVLVRDSSRLPSEGPRPAHVVVGDVLQAADVDKTVAGQDAVIVLLGTRNDLSPTTVMSEGARNIVAAMKAHGVDKVVACTSAFLLWDPTKVPPRLQAVTDDHIRMHKVLRESGLKYVAVMPPHIGDQPLTGAYTVTLDGRGPSRVISKHDLGHFMLRCLTTDEYDGHSTYPSHQYQ

SEQ ID NO: 386 - protein, 1321 aa, Homo sapiens [sequence omitted]

SEQ ID NO: 387 - protein, 269 aa, Homo sapiens
MAAALFVLLGFALLGTHGASGAAGTVFTTVEDLGSKILLTCSLNDSATEVTGHRWLKGGVVLKEDALPGQKTEFKVDSDDQWGEYSCVFLPEPMGTANIQLHGPPRVKAVKSSEHINEGETAMLVCKSESVPPVTDWAWYKITDSEDKALMNGSESRFFVSSSQGRSELHIENLNMEADPGQYRCNGTSSKGSDQAIITLRVRSHLAALWPFLGIVAEVLVLVTIIFIYEKRRKPEDVLDDDDAGSAPLKSSGQHQNDKGKNVRQRNSS

SEQ ID NO: 388 - protein, 350 aa, Homo sapiens
MNSFNYTTPDYGHYDDKDTLDLNTPVDKTSNTLRVPDILALVIFAVVFLVGVLGNALVVWVTAFEAKRTINAIWFLNLAVADFLSCLALPILFTSIVQHHHWPFGGAACSILPSLILLNMYASILLLATISADRFLLVFKPIWCQNFRGAGLAWIACAVAWGLALLLTIPSFLYRVVREEYFPPKVLCGVDYSHDKRRERAVAIVRLVLGFLWPLLTLTICYTFILLRTWSRRATRSTKTLKVVVAVVASFFIFWLPYQVTGIMMSFLEPSSPTFLLLNKLDSLCVSFAYINCCINPIIYVVAGQGFQGRLRKSLPSLLRNVLTEESVVRESKSFTRSTVDTMAQKTQAV

SEQ ID NO: 389 - protein, 261 aa, Homo sapiens
MASPDWGYDDKNGPEQWSKLYPIANGNNQSPVDIKTSETKHDTSLKPISVSYNPATAKEIINVGHSFHVNFEDNDNRSVLKGGPFSDSYRLFQFHFHWGSTNEHGSEHTVDGVKYSAELHVAHWNSAKYSSLAEAASKADGLAVIGVLMKVGEANPKLQKVLDALQAIKTKGKRAPFTNFDPSTLLPSSLDFWTYPGSLTHPPLYESVTWIICKESISVSSEQLAQFRSLLSNVEGDNAVPMQHNNRPTQPLKGRTVRASF

SEQ ID NO: 390 - protein, 700 aa, Homo sapiens
MAGIAAKLAKDREAAEGLGSHERAIKYLNQDYEALRNECLEAGTLFQDPSFPAIPSALGFKELGPYSSKTRGMRWKRPTEICADPQFIIGGATRTDICQGALGDCWLLAAIASLTLNEEILARVVPLNQSFQENYAGIFHFQFWQYGEWVEVVVDDRLPTKDGELLFVHSAEGSEFWSALLEKAYAKINGCYEALSGGATTEGFEDFTGGIAEWYELKKPPPNLFKIIQKALQKGSLLGCSIDITSAADSEAITFQKLVKGHAYSVTGAEEVESNGSLQKLIRIRNPWGEVEWTGRWNDNCPSWNTIDPEERERLTRRHEDGEFWMSFSDFLRHYSRLEICNLTPDTLTSDTYKKWKLTKMDGNWRRGSTAGGCRNYPNTFWMNPQYLIKLEEEDEDEEDGESGCTFLVGLIQKHRRRQRKMGEDMHTIGFGIYEVPEELSGQTNIHLSKNFFLTNRARERSDTFINLREVLNRFKLPPGEYILVPSTFEPNKDGDFCIRVFSEKKADYQAVDDEIEANLEEFDISEDDIDDGVRRLFAQLAGEDAEISAFELQTILRRVLAKRQDIKSDGFSIETCKIMVDMLDSDGSGKLGLKEFYILWTKIQKYQKIYREIDVDRSGTMNSYEMRKALEEAGFKMPCQLHQVIVARFADDQLIIDFDNFVRCLVRLETLFKIFKQLDPENTGTIELDLISWLCFSVL

SEQ ID NO: 391 - protein, 277 aa, Homo sapiens
MSSCSRVALVTGANRGIGLAIARELCRQFSGDVVLTARDVARGQAAVQQLQAEGLSPRFHQLDIDDLQSIRALRDFLRKEYGGLNVLVNNAAVAFKSDDPMPFDIKAEMTLKTNFFATRNMCNELLPIMKPHGRVVNISSLQCLRAFENCSEDLQERFHSETLTEGDLVDLMKKFVEDTKNEVHEREGWPNSPYGVSKLGVTVLSRILARRLDEKRKADRILVNACCPGPVKTDMDGKDSIRTVEEGAETPVYLALLPPDATEPQGQLVHDKVVQNW

SEQ ID NO: 392 - protein, 558 aa, Homo sapiens
MELPAVGEHVFAVESIEKKRIRKGRVEYLVKWRGWSPKYNTWEPEENILDPRLLIAFQNRERQEQLMGYRKRGPKPKPLVVQVPTFARRSNVLTGLQDSSTDNRAKLDLGAQGKGQGHQYELNSKKHHQYQPHSKEGKPRPPGKSGKYYYQLNSKKHHPYQPDPKMYDLQYQGGHKEAPSPTCPDLGAKSHPPDKWAQGAGAKGYLGAVKPLAGAAGAPGKGSEKGPPNGMMPAPKEAVTGNGIGGKMKIVKNKNKNGRIVIVMSKYMENGMQAVKIKSGEVAEGEARSPSHKKRAADERHPPADRTFKKAAGAEEKKVEAPPKRREEEVSGVSDPQPQDAGSRKLSPTKEAFGEQPLQLTTKPDLLAWDPARNTHPPSHHPHPHPHHHHHHHHHHHHAVGLNLSHVRKRCLSETHGEREPCKKRLTARSISTPTCLGGSPAAERPADLPPAAALRQPEVILLDSDLDEPIDLRSVKSRSEAGEPPSSLQVKPETPASAAVAVAAAAAPTTTAEKPPAEAQDEPAESLSEFKPFFGNIIITDVTANCLTVTFKEYVTV

SEQ ID NO: 393 - protein, 560 aa, Homo sapiens
MPQTRSQAQATISFPKRKLSRALNKAKNSSDAKLEPTNVQTVTCSPRVKALPLSPRKRLGDDNLCNTPHLPPCSPPKQGKKENGPPHSHTLKGRRLVFDNQLTIKSPSKRELAKVHQNKILSSVRKSQEITTNSEQRCPLKKESACVRLFKQEGTCYQQAKLVLNTAVPDRLPAREREMDVIRNFLREHICGKKAGSLYLSGAPGTGKTACLSRILQDLKKELKGFKTIMLNCMSLRTAQAVFPAIAQEICQEEVSRPAGKDMMRKLEKHMTAEKGPMIVLVLDEMDQLDSKGQDVLYTLFEWPWLSNSHLVLIGIANTLDLTDRILPRLQAREKCKPQLLNFPPYTRNQIVTILQDRLNQVSRDQVLDNAAVQFCARKVSAVSGDVRKALDVCRRAIEIVESDVKSQTILKPLSECKSPSEPLIPKRVGLIHISQVISEVDGNRMTLSQEGAQDSFPLQQKILVCSLMLLIRQLKIKEVTLGKLYEAYSKVCRKQQVAAVDQSECLSLSGLLEARGILGLKRNKETRLTKVFFKIEEKEIEHALKDKALIGNILATGLP

SEQ ID NO: 394 - protein, 713 aa, Homo sapiens
MQPRTPLVLCVLLSQVLLLTSAEDLDCTPGFQQKVFHINQPAEFIEDQSILNLTFSDCKGNDKLRYEVSSPYFKVNSDGGLVALRNITAVGKTLFVHARTPHAEDMAELVIVGGKDIQGSLQDIFKFARTSPVPRQKRSIVVSPILIPENQRQPFPRDVGKVVDSDRPERSKFRLTGKGVDQEPKGIFRINENTGSVSVTRTLDREVIAVYQLFVETTDVNGKTLEGPVPLEVIVIDQNDNRPIFREGPYIGHVMEGSPTGTTVMRMTAFDADDPATDNALLRYNIRQQTPDKPSPNMFYIDPEKGDIVTVVSPALLDRETLENPKYELIIEAQDMAGLDVGLTGTATATIMIDDKNDHSPKFTKKEFQATVEEGAVGVIVNLTVEDKDDPTTGAWRAAYTIINGNPGQSFEIHTNPQTNEGMLSVVKPLDYEISAFHTLLIKVENEDPLVPDVSYGPSSTATVHITVLDVNEGPVFYPDPMMVTRQEDLSVGSVLLTVNATDPDSLQHQTIRYSVYKDPAGWLNINPINGTVDTTAVLDRESPFVDNSVYTALFLAIDSGNPPATGTGTLLITLEDVNDNAPFIYPTVAEVCDDAKNLSVVILGASDKDLHPNTDPFKFEIHKQAVPDKVWKISKINNTHALVSLLQNLNKANYNLPIMVTDSGKPPMTNITDLRVQVCSCRNSKVDCNAAGALRFSLPSVLLLSLFSLACL

SEQ ID NO: 395 - protein, 411 aa, Homo sapiens
MQCSWKAVLLLALASIAIQYTAIRTFTAKSFHTCPGLAEAGLAERLCEESPTFAYNLSRKTHILILATTRSGSSFVGQLFNQHLDVFYLFEPLYHVQNTLIPRFTQGKSPADRRVMLGASRDLLRSLYDCDLYFLENYIKPPPVNHTTDRIFRRGASRVLCSRPVCDPPGPADLVLEEGDCVRKCGLLNLTVAAEACRERSHVAIKTVRVPEVNDLRALVEDPRLNLKVIQLVRDPRGILASRSETFRDTYRLWRLWYGTGRKPYNLDVTQLTTVCEDFSNSVSTGLMRPPWLKGKYMLVRYEDLARNPMKKTEEIYGFLGIPLDSHVARWIQNNTRGDPTLGKHKYGTVRNSAATAEKWRFRLSYDIVAFAQNACQQVLAQLGYKIAASEEELKNPSVSLVEERDFRPFS

SEQ ID NO: 396 - protein, 419 aa, Homo sapiens
MASIFSKLLTGRNASLLFATMGTSVLTTGYLLNRQKVCAEVREQPRLFPPSADYPDLRKHNNCMAECLTPAIYSKLRNKVTPNGYTLDQCIQTGVDNPGHPFIKTVGMVAGDEESYEVFADLFDPVIKLRHNGYDPRVMKHTTDLDASKITQGQFDEHYVLSSRVRTGRSIRGLSLPPACTRAERREVENVAITALEGLKGDLAGRYYKLSEMTEQDQQRLIDDHFLFDKPVSPLLTCAGMARDWPDARGIWHNYDKTFLIWINEEDHTRVISMEKGGNMKRVFERFCRGLKEVERLIQERGWEFMWNERLGYILTCPSNLGTGLRAGVHVRIPKLSKDPRFSKILENLRLQKRGTGGVDTAAVADVYDISNIDRIGRSEVELVQIVIDGVNYLVDCEKKLERGQDIKVPPPLPQFGKK

SEQ ID NO: 397 - protein, 86 aa, Homo sapiens
MAEDMETKIKNYKTAPFDSRFPNQNQTRNCWQNYLDFHRCQKAMTAKGGDISVCEWYQRVYQSLCPTSWVTDWDEQRAEGTFPGKI

SEQ ID NO: 398 - protein, 79 aa, Homo sapiens
MQALRVSQALIRSFSSTARNRFQNRVREKQKLFQEDNDIPLYLKGGIVDNILYRVTMTLCLGGTVYSLYSLGWASFPRN

SEQ ID NO: 399 - protein, 83 aa, Homo sapiens
MLRNLLALRQIGQRTISTASRRHFKNKVPEKQKLFQEDDEIPLYLKGGVADALLYRATMILTVGGTAYAIYELAVASFPKKQE

SEQ ID NO: 400 - protein, 80 aa, Homo sapiens
MFPLVKSALNRLQVRSIQQTMARQSHQKRTPDFHDKYGNAVLASGATFCIVTWTYVATQVGIEWNLSPVGRVTPKEWRNQ

SEQ ID NO: 401 - protein, 63 aa, Homo sapiens
MLGQSIRRFTTSVVRRSHYEEGPGKNLPFSVENKWSLLAKMCLYFGSAFATPFLVVRHQLLKT

SEQ ID NO: 402 - protein, 537 aa, Homo sapiens
MAAQCVTKVALNVSCANLLDKDIGSKSDPLCVLFLNTSGQQWYEVERTERIKNCLNPQFSKTFIIDYYFEVVQKLKFGVYDIDNKTIELSDDDFLGECECTLGQIVSSKKLTRPLVMKTGRPAGKGSITISAEEIKDNRVVLFEMEARKLDNKDLFGKSDPYLEFHKQTSDGNWLMVHRTEVVKNNLNPVWRPFKISLNSLCYGDMDKTIKVECYDYDNDGSHDLIGTFQTTMTKLKEASRSSPVEFECINEKKRQKKKSYKNSGVISVKQCEITVECTFLDYIMGGCQLNFTVGVDFTGSNGDPRSPDSLHYISPNGVNEYLTALWSVGLVIQDYDADKMFPAFGFGAQIPPQWQVSHEFPMNFNPSNPYCNGIQGIVEAYRSCLPQIKLYGPTNFSPIINHVARFAAAATQQQTASQYFVLLIITDGVITDLDETRQAIVNASRLPMSIIIVGVGGADFSAMEFLDGDGGSLRSPLGEVAIRDIVQFVPFRQFQNAPKEALAQCVLAEIPQQVVGYFNTYKLLPPKNPATKQQKQ

SEQ ID NO: 403 - protein, 773 aa, Homo sapiens
MAEAHQAVAFQFTVTPDGIDLRLSHEALRQIYLSGLHSWKKKFIRFKNGIITGVYPASPSSWLIVVVGVMTTMYAKIDPSLGIIAKINRTLETANCMSSQTKNVVSGVLFGTGLWVALIVTMRYSLKVLLSYHGWMFTEHGKMSRATKIWMGMVKIFSGRKPMLYSFQTSLPRLPVPAVKDTVNRYLQSVRPLMKEEDFKRMTALAQDFAVGLGPRLQWYLKLKSWWATNYVSDWWEEYIYLRGRGPLMVNSNYYAMDLLYILPTHIQAARAGNAIHAILLYRRKLDREEIKPIRLLGSTIPLCSAQWERMFNTSRIPGEETDTIQHMRDSKHIVVYHRGRYFKVWLYHDGRLLKPREMEQQMQRILDNTSEPQPGEARLAALTAGDRVPWARCRQAYFGRGKNKQSLDAVEKAAFFVTLDETEEGYRSEDPDTSMDSYAKSLLHGRCYDRWFDKSFTFVVFKNGKMGLNAEHSWADAQIVAHLWEYVMSIDSLQLGYAEDGHCKGDINPNIPYPTRLQWDIPGECQEVIETSLNTANLLANDVDFHSFPFVAFGKGIIKKCRTSPDTFVQLALQLAHYKDMGKFCLTYEASMTRLFREGRTETVRSCTTESCDFVRAMVDPAQTVEQRLKLFKLASEKHQHMYRLAMTGSGIDRHLFCLYVVSKYLAVESPFLKEVLSEPWRLSTSQTPQQQVELFDLENNPEYVSSGGGFGPVADDGYGVSYILVGENLINFHISSKFSCPETDSHRFGRHLKEAMTDIITLFGLSSNSKK

SEQ ID NO: 404 - protein, 208 aa, Homo sapiens
MASKCPKCDKTVYFAEKVSSLGKDWHKFCLKCERCSKTLTPGGHAEHDGKPFCHKPCYATLFGPKGVNIGGAGSYIYEKPLAEGPQVTGPIEVPAARAEERKASGPPKGPSRASSVTTFTGEPNTCPRCSKKVYFAEKVTSLGKDWHRPCLRCERCGKTLTPGGHAEHDGQPYCHKPCYGILFGPKGVNTGAVGSYIYDRDPEGKVQP

SEQ ID NO: 405 - protein, 175 aa, Homo sapiens
MDIAIHHPWIRRPFFPFHSPSRLFDQFFGEHLLESDLFPTSTSLSPFYLRPPSFLRAPSWFDTGLSEMRLEKDRFSVNLDVKHFSPEELKVKVLGDVIEVHGKHEERQDEHGFISREFHRKYRIPADVDPLTITSSLSSDGVLTVNGPRKQVSGPERTIPITREEKPAVTAAPKK

SEQ ID NO: 406 - protein, 412 aa, Homo sapiens
MQPSSLLPLALCLLAAPASALVRIPLHKFTSIRRTMSEVGGSVEDLIAKGPVSKYSQAVPAVTEGPIPEVLKNYMDAQYYGEIGIGTPPQCFTVVFDTGSSNLWVPSIHCKLLDIACWIHHKYNSDKSSTYVKNGTSFDIHYGSGSLSGYLSQDTVSVPCQSASSASALGGVKVERQVFGEATKQPGITFIAAKFDGILGMAYPRISVNNVLPVFDNLMQQKLVDQNIFSFYLSRDPDAQPGGELMLGGTDSKYYKGSLSYLNVTRKAYWQVHLDQVEVASGLTLCKEGCEAIVDTGTSLMVGPVDEVRELQKAIGAVPLIQGEYMIPCEKVSTLPAITLKLGGKGYKLSPEDYTLKVSQAGKTLCLSGFMGMDIPPPSGPLWILGDVFIGRYYTVFDRDNNRVGFAEAARL

SEQ ID NO: 407 - protein, 410 aa, Homo sapiens
MVLKAEHTRSPSATLPSNVPSCRSLSSSEDGPSGPSSLADGGLAHNLQDSVRHRILYLSEQLRVEKASRDGNTVSYLKLVSKADRHQVPHIQQAFEKVNQRASATIAQIEHRLHQCHQQLQELEEGCRPEGLLLMAESDPANCEPPSEKALLSEPPEPGGEDGPVNLPHASRPFILESRFQSLQQGTCLETEDVAQQQNLLLQKVKAELEEAKRFHISLQESYHSLKERSLTDLQLLLESLQEEKCRQALMEEQVNGRLQGQLNEIYNLKHNLACSEERMAYLSYERAKEIWEITETFKSRISKLEMLQQVTQLEAAEHLQSRPPQMLFKFLSPRLSLATVLLVFVSTLCACPSSLISSRLCTCTMLMLIGLGVLAWQRWRAIPATDWQEWVPSRCRLYSKDSGPPADGP

SEQ ID NO: 408 - protein, 260 aa, Homo sapiens [sequence omitted]

SEQ ID NO: 409 - protein, 335 aa, Homo sapiens
MKLPARVFFTLGSRLPCGLAPRRFFSYGTKILYQNTEALQSKFFSPLQKAMLPPNSFQGKVAFITGGGTGLGKGMTTLLSSLGAQCVIASRKMDVLKATAEQISSQTGNKVHAIQCDVRDPDMVQNTVSELIKVAGHPNIVINNAAGNFISPTERLSPNAWKTITDIVLNGTAFVTLEIGKQLIKAQKGAAFLSITTIYAETGSGFVVPSASAKAGVEAMSKSLAAEWGKYGMRFNVIQPGPIKTKGAFSRLDPTGTFEKEMIGRIPCGRLGTVEELANLAAFLCSDYASWINGAVIKFDGGEEVLISGEFNDLRKVTKEQWDTIEELIRKTKGS

SEQ ID NO: 410 - protein, 519 aa, Homo sapiens
MAAPSRLLIRGGRVVNDDFSEVADVLVEDGVVRALGHDLLPPGGAPAGLRVLDAAGKLVLPGGIDTHTHMQFPFMGSRSIDDFHQGTKAALSGGTTMIIDFAIPQKGGSLIEAFETWRSWADPKVCCDYSLHVAVTWWSDQVKEEMKILVQDKGVNSFKMFMAYKDLYMVTDLELYEAFSRCKEIGAIAQVHAENGDLIAEGAKKMLALGITGPEGHELCRPEAVEAEATLRAITIASAVNCPLYIVHVMSKSAAKVIADARRDGKVVYGEPIAASLGTDGTHYWNKEWHHAAHHVMGPPLRPDPSTPDFLMNLLANDDLTTTGTDNCTFNTCQKALGKDDFTKIPNGVNGVEDRMSVIWEKGVHSGKMDENRFVAVTSTNAAKIFNLYPRKGRIAVGSDADIVIWDPKGTRTISAKTHHQAVNFNIFEGMVCHGVPLVTISRGKVVYEAGVFSVTAGDGKFIPRKPFAEYIYKRIKQRDRTCTPTPVERAPYKGEVATLKSRVTKEDATAGTRKQAHP

SEQ ID NO: 411 - protein, 2080 aa, Homo sapiens
MLRVFILYAENVHTPDTDISDAYCSAVFAGVKKRTKVIKNSVNPVWNEGFEWDLKGIPLDQGSELHVVVKDHETMGRNRFLGEAKVPLREVLATPSLSASFNAPLLDTKKQPTGASLVLQVSYTPLPGAVPLFPPPTPLEPSPTLPDLDVVADTGGEEDTEDQGLTGDEAEPFLDQSGGPGAPTTPRKLPSRPPPHYPGIKRKRSAPTSRKLLSDKPQDFQIRVQVIEGRQLPGVNIKPVVKVTAAGQTKRTRIHKGNSPLFNETLFFNLFDSPGELFDEPIFITVVDSRSLRTDALLGEFRMDVGTIYREPRHAYLRKWLLLSDPDDFSAGARGYLKTSLCVLGPGDEAPLERKDPSEDKEDIESNLLRPTGVALRGAHFCLKVFRAEDLPQMDDAVMDNVKQIFGFESNKKNLVDPFVEVSFAGKMLCSKILEKTANPQWNQNITLPAMFPSMCEKMRIRIIDWDRLTHNDIVATTYLSMSKISAPGGEIEEEPAGAVKPSKASDLDDYLGFLPTFGPCYINLYGSPREFTGFPDPYTELNTGKGEGVAYRGRLLLSLETKLVEHSEQKVEDLPADDILRVEKYLRRRKYSLFAAFYSATMLQDVDDAIQFEVSIGNYGNKFDMTCLPLASTTQYSRAVFDGCHYYYLPWGNVKPVVVLSSYWEDISHRIETQNQLLGIADRLEAGLEQVHLALKAQCSTEDVDSLVAQLTDELIAGCSQPLGDIHETPSATHLDQYLYQLRTHHLSQITEAALALKLGHSELPAALEQAEDWLLRLRALAEEPQNSLPDIVIWMLQGDKRVAYQRVPAHQVLFSRRGANYCGKNCGKLQTIFLKYPMEKVPGARMPVQIRVKLWFGLSVDEKEFNQFAEGKLSVFAETYENETKLALVGNWGTTGLTYPKFSDVTGKIKLPKDSFRPSAGWTWAGDWFVCPEKTLLHDMDAGHLSFVEEVFENQTRLPGGQWIYMSDNYTDVNGEKVLPKDDIECPLGWKWEDEEWSTDLNRAVDEQGWEYSITIPPERKPKHWVPAEKMYYTHRRRRWVRLRRRDLSQMEALKRHRQAEAEGEGWEYASLFGWKFHLEYRKTDAFRRRRWRRRMEPLEKTGPAAVFALEGALGGVMDDKSEDSMSVSTLSFGVNRPTISCIFDYGNRYHLRCYMYQARDLAAMDKDSFSDPYAIVSFLHQSQKTVVVKNTLNPTWDQTLIFYEIEIFGEPATVAEQPPSIVVELYDHDTYGADEFMGRCICQPSLERMPRLAWFPLTRGSQPSGELLASFELIQREKPAIHHIPGFEVQETSRILDESEDTDLPYPPPQREANIYMVPQNIKPALQRTAIEILAWGLRNMKSYQLANISSPSLVVECGGQTVQSCVIRNLRKNPNFDICTLFMEVMLPREELYCPPITVKVIDNRQFGRRPVVGQCTIRSLESFLCDPYSAESPSPQGGPDDVSLLSPGEDVLIDIDDKEPLIPIQEEEFIDWWSKFFASIGEREKCGSYLEKDFDTLKVYDTQLENVEAFEGLSDFCNTFKLYRGKTQEETEDPSVIGEFKGLFKIYPLPEDPAIPMPPRQFHQLAAQGPQECLVRIYIVRAFGLQPKDPNGKCDPYIKISIGKKSVSDQDNYIPCTLEPVFGKMFELTCTLPLEKDLKITLYDYDLLSKDEKIGETVVDLENRLLSKFGARCGLPQTYCVSGPNQWRDQLRPSQLLHLFCQQHRVKAPVYRTDRVMFQDKEYSIEEIEAGRIPNPHLGPVEERLALHVLQQQGLVPEHVESRPLYSPLQPDIEQGKLQMWVDLFPKALGRPGPPFNITPRRARRFFLRCIIWNTRDVILDDLSLTGEKMSDIYVKGWMIGFEEHKQKTDVHYRSLGGEGNFNWRFIFPFDYLPAEQVCTIAKKDAFWRLDKTESKIPARVVFQIWDNDKFSFDDFLGSLQLDLNRMPKPAKTAKKCSLDQLDDAFHPEWFVSLFEQKTVKGWWPCVAEEGEKKILAGKLEMTLEIVAESEHEERPAGQGRDEPNMNPKLEDPRRPDTSFLWFTSPYKTMKFILWRRFRWAIILFIILFILLLFLAIFIYAFPNYAAMKLVKPFS

SEQ ID NO: 412 - protein, 770 aa, Homo sapiens
MRGVWPPPVSALLSALGMSTYKRATLDEEDLVDSLSEGDAYPNGLQVNFHSPRSGQRCWAARTQVEKRLVVLVVLLAAGLVACLAALGIQYQTRSPSVCLSEACVSVTSSILSSMDPTVDPCHDFFSYACGGWIKANPVPDGHSRWGTFSNLWEHNQAIIKHLLENSTASVSEAERKAQVYYRACMNETRIEELRAKPLMELIERLGGWNITGPWAKDNFQDTLQVVTAHYRTSPFFSVYVSADSKNSNSNVIQVDQSGLGLPSRDYYLNKTENEKVLTGYLNYMVQLGKLLGGGDEEAIRPQMQQILDFETALANITIPQEKRRDEELIYHKVTAAELQTLAPAINWLPFLNTIFYPVEINESEPIVVYDKEYLEQISTLINTTDRCLLNNYMIWNLVRKTSSFLDQRFQDADEKFMEVMYGTKKTCLPRWKFCVSDTENNLGFALGPMFVKATFAEDSKSIATEIILEIKKAFEESLSTLKWMDEETRKSAKEKADAIYNMIGYPNFIMDPKELDKVFNDYTAVPDLYFENAMRFFNFSWRVTADQLRKAPNRDQWSMTPPMVNAYYSPTKNEIVFPAGILQAPFYTRSSPKALNFGGIGVVVGHELTHAFDDQGREYDKDGNLRPWWKNSSVEAFKRQTECMVEQYSNYSVNGEPVNGRHTLGENIADNGGLKAAYRAYQNWVKKNGAEHSLPTLGLTNNQLFFLGFAQVWCSVRTPESSHEGLITDPHSPSRFRVIGSLSNSKEFSEHFRCPPGSPMNPPHKCEVW

SEQ ID NO: 413 - protein, 328 aa, Homo sapiens
MAAGIVASRRLRDLLTRRLTGSNYPGLSISLRLTGSSAQEEASGVALGEAPDHSYESLRVTSAQKHVLHVQLNRPNKRNAMNKVFWREMVECFNKISRDADCRAVVISGAGKMFTAGIDLMDMASDILQPKGDDVARISWYLRDIITRYQETFNVIERCPKPVIAAVHGGCIGGGVDLVTACDIRYCAQDAFFQVKEVDVGLAADVGTLERLPKVIGNQSLVNELAFTAHKMMADEALDSGLVSRVFPDKEVMLDAALPLAPEISSKTTVLVQSTKVNLLYSRDHSVAESLNYVASWNMSMLQTQDLVKSVQPTTENKELKTVTFSKL

SEQ ID NO: 414 - protein, 463 aa, Homo sapiens
MGKEKTHINIVVIGHVDSGKSTTTGHLIYKCGGIDKRTIEKFEKEAAEMGKGSFKYAWVLDKLKAERERGITIDISLWKFETTKYYITIIDAPGHRDFIKNMITGTSQADCAVLIVAAGVGEFEAGISKNGQTREHALLAYTLGVKQLIVGVNKMDSTEPAYSEKRYDEIVKEVSAYIKKIGYNPATVPFVPISGWHGDNMLEPSPNMPWFKGWKVERKEGNASGVSLLEALDTILPPTRPTDKPLRLPLQDVYKIGGIGTVPVGRVETGILRPGMVVTFAPVNITTEVKSVEMHHEALSEALPGDNVGFNVKNVSVKDIRRGNVCGDSKSDPPQEAAQFTSQVIILNHPGQISAGYSPVIDCHTAHIACKFAELKEKIDRRSGKKLEDNPKSLKSGDAAIVEMVPGKPMCVESFSQYPPLGRFAVRDMRQTVAVGVIKNVEKKSGGAGKVTKSAQKAQKAGK

SEQ ID NO: 415 - protein, 472 aa, Homo sapiens
MAGGEAGVTLGQPHLSRQDLTTLDVTKLTPLSHEVISRQATINIGTIGHVAHGKSTVVKAISGVHTVRFKNELERNITIKLGYANAKIYKLDDPSCPRPECYRSCGSSTPDEFPTDIPGTKGNFKLVRHVSFVDCPGHDILMATMLNGAAVMDAALLLIAGNESCPQPQTSEHLAAIEIMKLKHILILQNKIDLVKESQAKEQYEQILAFVQGTVAEGAPIIPISAQLKYNIEVVCEYIVKKIPVPPRDFTSEPRLIVIRSFDVNKPGCEVDDLKGGVAGGSILKGVLKVGQEIEVRPGIVSKDSEGKLMCKPIFSKIVSLFAEHNDLQYAAPGGLIGVGTKIDPTLCRADRMVGQVLGAVGALPEIFTELEISYFLLRRLLGVRTEGDKKAAKVQKLSKNEVLMVNIGSLSTGGRVSAVKADLGKIVLTNPVCTEVGEKIALSRRVEKHWRLIGWGQIRRGVTIKPTVDDD

SEQ ID NO: 416 - protein, 100 aa, Homo sapiens
MSTSTSCPIPGGRDQLPDCYSTTPGGTLYATTPGGTRIIYDRKFLLECKNSPIARTPPCCLPQIPGVTTPPTAPLSKLEELKEQETEEEIPDDAQFEMDI

SEQ ID NO: 417 - protein, 333 aa, Homo sapiens
MFRAAAPGQLRRAASLLRFQSTLVIAEHANDSLAPITLNTITAATRLGGEVSCLVAGTKCDKVAQDLCKVAGIAKVLVAQHDVYKGLLPEELTPLILATQKQFNYTHICAGASAFGKNLLPRVAAKLEVAPISDIIAIKSPDTFVRTIYAGNALCTVKCDEKVKVFSVRGTSFDAAATSGGSASSEKASSTSPVEISEWLDQKLTKSDRPELTGAKVVVSGGRGLKSGENFKLLYDLADQLHAAVGASRAAVDAGFVPNDMQVGQTGKIVAPELYIAVGISGAIQHLAGMKDSKTIVAINKDPEAPIFQVADYGIVADLFKVVPEMTEILKKK

SEQ ID NO: 418 - protein, 255 aa, Homo sapiens
MAELRVLVAVKRVIDYAVKIRVKPDRTGVVTDGVKHSMNPFCEIAVEEAVRLKEKKLVKEVIAVSCGPAQCQETIRTALAMGADRGIHVEVPPAEAERLGPLQVARVLAKLAEKEKVDLVLLGKQAIDDDCNQTGQMTAGFLDWPQGTFASQVTLEGDKLKVEREIDGGLETLRLKLPAVVTADLRLNEPRYATLPNIMKAKKKKIEVIKPGDLGVDLTSKLSVISVEDPPQRTAGVKVETTEDLVAKLKEIGRI

SEQ ID NO: 419 - protein, 2033 aa, Homo sapiens
MFKGLSKGSQGKGSPKGSPAKGSPKGSPSRHSRAATQELALLISRMQANADQVERDILETQKRLQQDRLNSEQSQALQHQQETGRSLKEAEVLLKDLFLDVDKARRLKHPQAEEIEKDIKQLHERVTQECAEYRALYEKMVLPPDVGPRVDWARVLEQKQKQVCAGQYGPGMAELEQQIAEHNILQKEIDAYGQQLRSLVGPDAATIRSQYRDLLKAASWRGQSLGSLYTHLQGCTRQLSALAEQQRRILQQDWSDLMADPAGVRREYEHFKQHELLSQEQSVNQLEDDGERMVELRHPAVGPIQAHQEALKMEWQNFLNLCICQETQLQHVEDYRRFQEEADSVSQTLAKLNSNLDAKYSPAPGGPPGAPTELLQQLEAEEKRLAVTERATGDLQRRSRDVAPLPQRRNPPQQPLHVDSICDWDSGEVQLLQGERYKLVDNTEPHAWVVQGPGGETKRAPAACFCIPAPDPDAVARASRLASELQALKQKLATVQSRLKASAVESLRPSQQAPSGSDLANPQAQKLLTQMTRLDGDLGQIERQVLAWARAPLSRPTPLEDLEGRIHSHEGTAQRLQSLGTEKETAQKECEAFLSTRPVGPAALQLPVALNSVKNKFSDVQVLCSLYGEKAKAALDLERQIQDADRVIRGFEATLVQEAPIPAEPGALQERVSELQRQRRELLEQQTCVLRLHRALKASEHACAALQNNFQEFCQDLPRQQRQVRALTDRYHAVGDQLDLREKVVQDAALTYQQFKNCKDNLSSWLEHLPRSQVRPSDGPSQIAYKLQAQKRLTQEIQSRERDRATASHLSQALQAALQDYELQADTYRCSLEPTLAVSAPKRPRVAPLQESIQAQEKNLAKAYTEVAAAQQQLLQQLEFARKMLEKKELSEDIRRTHDAKQGSESPAQAGRESEALKAQLEEERKRVARVQHELEAQRSQLLQLRTQRPLERLEEKEVVEFYRDPQLEGSLSRVKAQVEEEGKRRAGLQADLEVAAQKVVQLESKRKTMQPHLLTKEVTQVERDPGLDSQAAQLRIQIQQLRGEDAVISARLEGLKKELLALEKREVDVKEKVVVKEVVKVEKNLEMVKAAQALRLQMEEDAARRKQAEEAVAKLQARIEDLERAISSVEPKVIVKEVKKVEQDPGLLQESSRLRSLLEEERTKNATLARELSDLHSKYSVVEKQRPKVQLQERVHEIFQVDPETEQEITRLKAKLQEMAGKRSGVEKEVEKLLPDLEVLRAQKPTVEYKEVTQEVVRHERSPEVLREIDRLKAQLNELVNSHGRSQEQLIRLQGERDEWRRERAKVETKTVSKEVVRHEKDPVLEKEAERLRQEVREAAQKRRAAEDAVYELQSKRLLLERRKPEEKVVVQEVVVTQKDPKLREEHSRLSGSLDEEVGRRRQLELEVQQLRAGVEEQEGLLSFQEDRSKKLAVERELRQLTLRIQELEKRPPTVQEKIIMEEVVKLEKDPDLEKSTEALRWDLDQEKTQVTELNRECKNLQVQIDVLQKAKSQEKTIYKEVIRVQKDRVLEDERARVWEMLNRERTARQAREEEARRLRERIDRAETLGRTWSREESELQRARDQADQECGRLQQELRALERQKQQQTLQLQEESKLLSQKTESERQKAAQRGQELSRLEAAILREKDQIYEKERTLRDLHAKVSREELSQETQTRETNLSTKISILEPETGKDMSPYEAYKRGIIDRGQYLQLQELECDWEEVTTSGPCGEESVLLDRKSGKQYSIEAALRCRRISKEEYHLYKDGHLPISEFALLVAGETKPSSSLSIGSIISKSPLASPAPQSTSFFSPSFSLGLGDDSFPIAGIYDTTTDNKCSIKTAVAKNMLDPITGQKLLEAQAATGGIVDLLSRERYSVHKAMERGLIENTSTQRLLNAQKAFTGIEDPVTKKRLSVGEAVQKGWMPRESVLPHLQVQHLTGGLIDPKRTGRIPIQQALLSGMISEELAQLLQDESSYEKDLTDPISKERLSYKEAMGRCRKDPLSGLLLLPAALEGYRCYRSASPTVPRSLR

SEQ ID NO: 420 - protein, 699 aa, Homo sapiens
MQAHELFRYFRMPELVDFRQCVTLPTNTLMGFGAFSRRLTTFWRPRHPKPLKPPWHLSMQSVEVAGSGGARRSALLDSDEPLVYFYDDVTTLYEGFQRGIQVSNNGPCLGSRKPDQPYEWLSYKQVAELSECIGSALIQKGFKTAPDQFIGIFAQNRPEWVIIEQGCFAYSMVIVPLYDTLGNEAITYIVNKAELSLVFVDKPEKAKLLLEGVENKLIPGLKIIVVMDSYGSELVERGQRCGVEVTSMKAMEDLGRANRRKPKPPAPEDLAVICFTSGTTGNPKGAMVTHRNIVSDCSAFVKATENTVNPCPDDTLISFLPLAHMFERVVECVMLCHGAKIGFFQGDIRLLMDDLKVLQPTVFPVVPRLLNRMFDRIFGQANTTVKRWLLDFASKRKEADVRSGIIRNNSLWDRLIFHKVQSSLGGRVRLMVTGAAPVSATVLTFLRAALGCQFYEGYGQTECTAGCCLTMPGDWTTGHVGAPMPCNLIKLGWQLEEMNYMASEGEGEVCVKGPNVFQGYLKDPAKTAEALDKDGWLHTGDIGKWLPNGTLKIIDRKKHIFKLAQGEYIAPEKIENIYMRSEPVAQVFVHGESLQAFLIAIVVPDVETLCSWAQKRGFEGSFEELCRNKDVKKAILEDMVRLGKDSGLKPFEQVKGITLHPELFSIDNGLLTPTMKAKRPELRNYFRSQIDDLYSIIKV

SEQ ID NO: 421 - protein, 2911 aa, Homo sapiens
MGRRRRLCLQLYFLWLGCVVLWAQGTAGQPQPPPPKPPRPQPPPQQVRSATAGSEGGFLAPEYREEGAAVASRVRRRGQQDVLRGPNVCGSRFHSYCCPGWKTLPGGNQCIVPICRNSCGDGFCSRPNMCTCSSGQISSTCGSKSIQQCSVRCMNGGTCADDHCQCQKGYIGTYCGQPVCENGCQNGGRCIAQPCACVYGFTGPQCERDYRTGPCFTQVNNQMCQGQLTGIVCTKTLCCATTGRAWGHPCEMCPAQPQPCRRGFIPNIRTGACQDVDECQAIPGICQGGNCINTVGSFECRCPAGHKQSETTQKCEDIDECSIIPGICETGECSNTVGSYFCVCPRGYVTSTDGSRCIDQRTGMCFSGLVNGRCAQELPGRMTKMQCCCEPGRCWGIGTIPEACPVRGSEEYRRLCMDGLPMGGIPGSAGSRPGGTGGNGFAPSGNGNGYGPGGTGFIPIPGGNGFSPGVGGAGVGAGGQGPIITGLTILNQTIDICKHHANLCLNGRCIPTVSSYRCECNMGYKQDANGDCIDVDECTSNPCTNGDCVNTPGSYYCKCHAGFQRTPTKQACIDIDECIQNGVLCKNGRCVNSDGSFQCICNAGFELTTDGKNCVDHDECTTTNMCLNGMCINEDGSFKCICKPGFVLAPNGRYCTDVDECQTPGICMNGHCINSEGSFRCDCPPGLAVGMDGRVCVDTHMRSTCYGGIKKGVCVRPFPGAVTKSECCCANPDYGFGEPCQPCPAKNSAEFHGLCSSGVGITVDGRDINECALDPDICANGICENLRGSYRCNCNSGYEPDASGRNCIDIDECLVNRLLCDNGLCRNTPGSYSCTCPPGYVFRTETETCEDINECESNPCVNGACRNNLGSFNCECSPGSKLSSTGLICIDSLKGTCWLNIQDSRCEVNINGATLKSECCATLGAAWGSPCERCELDTACPRGLARIKGVTCEDVNECEVFPGVCPNGRCVNSKGSFHCECPEGLTLDGTGRVCLDIRMEQCYLKWDEDECIHPVPGKFRMDACCCAVGAAWGTECEECPKPGTKEYETLCPRGAGFANRGDVLTGRPFYKDINECKAFPGMCTYGKCRNTIGSFKCRCNSGFALDMEERNCTDIDECRISPDLCGSGICVNTPGSFECECFEGYESGFMMMKNCMDIDGCERNPLLCRGGTCVNTEGSFQCDCPLGHELSPSREDCVDINECSLSDNLCRNGKCVNMIGTYQCSCNPGYQATPDRQGCTDIDECMIMNGGCDTQCTNSEGSYECSCSEGYALMPDGRSCADIDECENNPDICDGGQCTNIPGEYRCLCYDGFMASMDMKTCIDVNECDLNSNICMFGECENTKGSFICHCQLGYSVKKGTTGCTDVDECEIGAHNCDMHASCLNIPGSFKCSCREGWIGNGIKCIDLDECSNGTHQCSINAQCVNTPGSYRCACSEGFTGDGFTCSDVDECAENINLCENGQCLNVPGAYRCECEMGFTPASDSRSCQDIDECSFQNICVSGTCNNLPGMFHCICDDGYELDRTGGNCTDIDECADPINCVNGLCVNTPGRYECNCPPDFQLNPTGVGCVDNRVGNCYLKFGPRGDGSLSCNTEIGVGVSRSSCCCSLGKAWGNPCETCPPVNSTEYYTLCPGGEGFRPNPITIILEDIDECQELPGLCQGGNCINTFGSFQCECPQGYYLSEDTRICEDIDECFAHPGVCGPGTCYNTLGNYTCICPPEYMQVNGGHNCMDMRKSFCYRSYNGTTCENELPFNVTKRMCCCTYNVGKAGNKPCEPCPTPGTADFKTICGNIPGFTFDIHTGKAVDIDECKEIPGICANGVCINQIGSFRCECPTGFSYNDLLLVCEDIDECSNGDNLCQRNADCINSPGSYRCECAAGFKLSPNGACVDRNECLEIPNVCSHGLCVDLQGSYQCICHNGFKASQDQTMCMDVDECERHPCGNGTCKNTVGSYNCLCYPGFELTHNNDCLDIDECSSFFGQVCRNGRCFNEIGSFKCLCNEGYELTPDGKNCIDTNECVALPGSCSPGTCQNLEGSFRCICPPGYEVKSENCIDINECDEDPNICLFGSCTNTPGGFQCLCPPGFVLSDNGRRCFDTRQSFCFTNFENGKCSVPKAFNTTKAKCCCSKMPGEGWGDPCELCPKDDEVAFQDLCPYGHGTVPSLHDTREDVNECLESPGICSNGQCINTDGSFRCECPMGYNLDYTGVRCVDTDECSIGNPCGNGTCTNVIGSFECNCNEGFEPGPMMNCEDINECAQNPLLCALRCMNTFGSYECTCPIGYALREDQKMCKDLDECAEGLHDCESRGMMCKNLIGTFMCICPPGMARRPDGEGCVDENECRTKPGICENGRCVNIIGSYRCECNEGFQSSSSGTECLDNRQGLCFAEVLQTICQMASSSRNLVTKSECCCDGGRGWGHQCELCPLPGTAQYKKICPHGPGYTTDGRDIDECKVMPNLCTNGQCINTMGSFRCFCKVGYTTDISGTSCIDLDECSQSPKPCNYICKNTEGSYQCSCPRGYVLQEDGKTCKDLDECQTKQHNCQFLCVNTLGGFTCKCPPGFTQHHTACIDNNECGSQPLLCGGKGICQNTPGSFSCECQRGFSLDATGLNCEDVDECDGNHRCQHGCQNILGGYRCGCPQGYIQHYQWNQCVDENECSNPNACGSASCYNTLGSYKCACPSGFSFDQFSSACHDVNECSSSKNPCNYGCSNTEGGYLCGCPPGYYRVGQGHCVSGMGFNKGQYLSLDTEVDEENALSPEACYECKINGYPKKDSRQKRSIHEPDPTAVEQISLESVDMDSPVNMKFNLSHLGSKEHILELRPAIQPLNNHIRYVISQGNDDSVFRIHQRNGLSYLHTAKKKLMPGTYTLEITSIPLYKKKELKKLEESNEDDYLLGELGEALRMRLQIQLY

SEQ ID NO: 422 - protein, 327 aa, Homo sapiens
MGGSALNQGVLEGDDAPGQSLYERLSQRMLDISGDRGVLKDVIREGAGDLVAPDASVLVKYSGYLEHMDRPFDSNYFRKTPRLMKLGEDITLWGMELGLLSMRRGELARFLFKPNYAYGTLGCPPLIPPNTTVLFEIELLDFLDCAESDKFCALSAEQQDQFPLQKVLKVAATEREFGNYLFRQNRFYDAKVRYKRALLLLRRRSAPPEEQHLVEAAKLPVLLNLSFTYLKLDRPTIALCYGEQALIIDQKNAKALFRCGQACLLLTEYQKARDFLVRAQKEQPFNHDINNELKKLASCYRDYVDKEKEMWHRMFAPCGDGSTAGES

SEQ ID NO: 423 - protein, 591 aa, Homo sapiens
MAVAPLRGALLLWQLLAAGGAALEIGRFDPERGRGAAPCQAVEIPMCRGIGYNLTRMPNLLGHTSQGEAAAELAEFAPLVQYGCHSHLRFFLCSLYAPMCTDQVSTPIPACRPMCEQARLRCAPIMEQFNFGWPDSLDCARLPTRNDPHALCMEAPENATAGPAEPHKGLGMLPVAPRPARPPGDLGPGAGGSGTCENPEKFQYVEKSRSCAPRCGPGVEVFWSRRDKDFALVWMAVWSALCFFSTAFTVLTFLLEPHRFQYPERPIIFLSMCYNVYSLAFLIRAVAGAQSVACDQEAGALYVIQEGLENTGCTLVFLLLYYFGMASSLWWVVLTLTWFLAAGKKWGHEAIEAHGSYFHMAAWGLPALKTIVILTLRKVAGDELTGLCYVASTDAAALTGFVLVPLSGYLVLGSSFLLTGFVALFHIRKIMKTGGTNTEKLEKLMVKIGVFSILYTVPATCVIVCYVYERLNMDFWRLRATEQPCAAAAGPGGRRDCSLPGGSVPTVAVFMLKIFMSLVVGITSGVWVWSSKTFQTWQSLCYRKIAAGRARAKACRAPGSYGRGTHCHYKAPTVVLHMTKTDPSLENPTHL

SEQ ID NO: 424 - protein, 785 aa, Homo sapiens
MVVPSLKLQDLIEEIRGAKTQAQEREVIQKECAHIRASFRDGDPVHRHRQLAKLLYVHMLGYPAHFGQMECLKLIASSRFTDKRVGYLGAMLLLDERHDAHLLITNSIKNDLSQGIQPVQGLALCTLSTMGSAEMCRDLAPEVEKLLLQPSPYVRKKAILTAVHMIRKVPELSSVFLPPCAQLLHERHHGILLGTITLITELCERSPAALRHFRKVVPQLVHILRTLVTMGYSTEHSISGVSDPFLQVQILRLLRILGRNHEESSETMNDLLAQVATNTDTSRNAGNAVLFETVLTIMDIRSAAGLRVLAVNILGRFLLNSDRNIRYVALTSLLRLVQSDHSAVQRHRPTVVECLRETDASLSRRALELSLALVNSSNVRAMMQELQAFLESCPPDLRADCASGILLAAERFAPTKRWHIDTILHVLTTAGTHVRDDAVANLTQLIGGAQELHAYSVRRLYNALAEDISQQPLVQVAAWCIGEYGDLLLAGNCEEIEPLQVDEEEVLALLEKVLQSHMSLPATRGYALTALMKLSTRLCGDNNRIRQVVSIYGSCLDVELQQRAVEYDTLFRKYDHMRAAILEKMPLVERDGPQADEEAKESKEAAQLSEAAPVPTEPQASQLLDLLDLLDGASGDVQHPPHLDPSPGGALVHLLDLPCVPPPPAPIPDLKVFEREGVQLNLSFIRPPENPALLLITITATNFSEGDVTHFICQAAVPKSLQLQLQAPSGNTVPARGGLPITQLFRILNPNKAPLRLKLRLTYDHFHQSVQEIFEVNNLPVESWQ

SEQ ID NO: 425 - protein, 522 aa, Homo sapiens
MAAVVAATRWWQLLLVLSAAGMGASGAPQPPNILLLLMDDMGWGDLGVYGEPSRETPNLDRMAAEGLLFPNFYSANPLCSPSRAALLTGRLPIRNGFYTTNAHARNAYTPQEIVGGIPDSEQLLPELLKKAGYVSKIVGKWHLGHRPQFHPLKHGFDEWFGSPNCHFGPYDNKARPNIPVYRDWEMVGRYYEEFPINLKTGEANLTQIYLQEALDFIKRQARHHPFFLYWAVDATHAPVYASKPFLGTSQRGRYGDAVREIDDSIGKILELLQDLHVADNTFVFFTSDNGAALISAPEQGGSNGPFLCGKQTTFEGGMREPALAWWPGHVTAGQVSHQLGSIMDLFTTSLALAGLTPPSDRAIDGLNLLPTLLQGRLMDRPIFYYRGDTLMAATLGQHKAHFWTWTNSWENFRQGIDFCPGQNVSGVTTHNLEDHTKLPLIFHLGRDPGERFPLSFASAEYQEALSRITSVVQQHQEALVPAQPQLNVCNWAVMNWAPPGCEKLGKCLTPPESIPKKCLWSH

SEQ ID NO: 426 - protein, 286 aa, Homo sapiens
MAARVLRARGAAWAGGLLQRAAPCSLLPRLRTWTSSSNRSREDSWLKSLFVRKVDPRKDAHSNLLAKKETSNLYKLQFHNVKPECLEAYNKICQEVLPKIHEDKHYPCTLVGTWNTWYGEQDQAVHLWRYEGGYPALTEVMNKLRENKEFLEFRKARSDMLLSRKNQLLLEFSFWNEPVPRSGPNIYELRSYQLRPGTMIEWGNYWARAIRFRQDGNEAVGGFFSQIGQLYMVHHLWAYRDLQTREDIRNAAWHKHGWEELVYYTVPLIQEMESRIMIPLKTSPLQ

SEQ ID NO: 427 - protein, 355 aa, Homo sapiens
MGCTVSAEDKAAAERSKMIDKNLREDGEKAAREVKLLLLGAGESGKSTIVKQMKIIHEDGYSEEECRQYRAVVYSNTIQSIMAIVKAMGNLQIDFADPSRADDARQLFALSCTAEEQGVLPDDLSGVIRRLWADHGVQACFGRSREYQLNDSAAYYLNDLERIAQSDYIPTQQDVLRTRVKTTGIVETHFTFKDLHFKMFDVGGQRSERKKWIHCFEGVTAIIFCVALSAYDLVLAEDEEMNRMHESMKLFDSICNNKWFTDTSIILFLNKKDLFEEKITHSPLTICFPEYTGANKYDEAASYIQSKFEDLNKRKDTKEIYTHFTCATDTKNVQFVFDAVTDVIIKNNLKDCGLF

SEQ ID NO: 428 - protein, 350 aa, Homo sapiens [sequence omitted]

SEQ ID NO: 429 - protein, 413 aa, Homo sapiens
MAPPSVFAEVPQAQPVLVFKLTADFREDPDPRKVNLGVGAYRTDDCHPWVLPVVKKVEQKIANDNSLNHEYLPILGLAEFRSCASRLALGDDSPALKEKRVGGVQSLGGTGALRIGADFLARWYNGTNNKNTPVYVSSPTWENHNAVFSAAGFKDIRSYRYWDAEKRGLDLQGFLNDLENAPEFSIVVLHACAHNPTGIDPTPEQWKQIASVMKHRFLFPFFDSAYQGFASGNLERDAWAIRYFVSEGFEFFCAQSFSKNFGLYNERVGNLTVVGKEPESILQVLSQMEKIVRITWSNPPAQGARIVASTLSNPELFEEWTGNVKTMADRILTMRSELRARLEALKTPGTWNHITDQIGMFSFTGLNPKQVEYLVNEKHIYLLPSGRINVSGLTTKNLDYVATSIHEAVTKIQ

SEQ ID NO: 430 - protein, 626 aa, Homo sapiens
MPLLLLLLLLPSPLHPHPICEVSKVASHLEVNCDKRNLTALPPDLPKDTTILHLSENLLYTFSLATLMPYTRLTQLNLDRCELTKLQVDGTLPVLGTLDLSHNQLQSLPLLGQTLPALTVLDVSFNRLTSLPLGALRGLGELQELYLKGNELKTLPPGLLTPTPKLEKLSLANNNLTELPAGLLNGLENLDTLLLQENSLYTIPKGFFGSHLLPFAFLHGNPWLCNCEILYFRRWLQDNAENVYVWKQGVDVKAMTSNVASVQCDNSDKFPVYKYPGKGCPTLGDEGDTDLYDYYPEEDTEGDKVRATRTVVKFPTKAHTTPWGLFYSWSTASLDSQMPSSLHPTQESTKEQTTFPPRWTPNFTLHMESITFSKTPKSTTEPTPSPTTSEPVPEPAPNMTTLEPTPSPTTPEPTSEPAPSPTTPEPTPIPTIATSPTILVSATSLITPKSTFLTTTKPVSLLESTKKTIPELDQPPKLRGVLQGHLESSRNDPFLHPDFCCLLPLGFYVLGLFWLLFASVVLILLLSWVGHVKPQALDSGQGAALTTATQTTHLELQRGRQVTVPRAWLLFLRGSLPTFRSSLFLWVRPNGRVGPLVAGRRPSALSQGRGQDLLSTVSIRYSGHSL

SEQ ID NO: 431 - protein, 474 aa, Homo sapiens
MATNWGSLLQDKQQLEELARQAVDRALAEGVLLRTSQEPTSSEVVSYAPFTLFPSLVPSALLEQAYAVQMDFNLLVDAVSQNAAFLEQTLSSTIKQDDFTARLFDIHKQVLKEGIAQTVFLGLNRSDYMFQRSADGSPALKQIEINTISASFGGLASRTPAVHRHVLSVLSKTKEAGKILSNNPSKGLALGIAKAWELYGSPNALVLLIAQEKERNIFDQRAIENELLARNIHVIRRTFEDISEKGSLDQDRRLFVDGQEIAVVYFRDGYMPRQYSLQNWEARLLLERSHAAKCPDIATQLAGTKKVQQELSRPGMLEMLLPGQPEAVARLRATFAGLYSLDVGEEGDQAIAEALAAPSRFVLKPQREGGGNNLYGEEMVQALKQLKDSEERASYILMEKIEPEPFENCLLRPGSPARVVQCISELGIFGVYVRQEKTLVMNKHVGHLLRTKAIEHADGGVAAGVAVLDNPYPV

SEQ ID NO: 432 - protein, 216 aa, Homo sapiens
MQAGKPILYSYFRSSCSWRVRIALALKGIDYKTVPINLIKDRGQQFSKDFQALNPMKQVPTLKIDGITIHQSLAIIEYLEETRPTPRLLPQDPKKRASVRMISDLIAGGIQPLQNLSVLKQVGEEMQLTWAQNAITCGFNALEQILQSTAGIYCVGDEVTMADLCLVPQVANAERFKVDLTPYPTISSINKRLLVLEAFQVSHPCRQPDTPTELRA

SEQ ID NO: 433 - protein, 218 aa, Homo sapiens
MATRSPGVVISDDEPGYDLDLFCIPNHYAEDLERVFIPHGLIMDRTERLARDVMKEMGGHHIVALCVLKGGYKFFADLLDYIKALNRNSDRSIPMTVDFIRLKSYCNDQSTGDIKVIGGDDLSTLTGKNVLIVEDIIDTGKTMQTLLSLVRQYNPKMVKVASLLVKRTPRSVGYKPDFVGFEIPDKFVVGYALDYNEYFRDLNHVCVISETGKAKYKA

SEQ ID NO: 434 - protein, 699 aa, Homo sapiens
MGHHRPWLHASVLWAGVASLLLPPAMTQQLRGDGLGFRNRNNSTGVAGLSEEASAELRHHLHSPRDHPDENKDVSTENGHHFWSHPDREKEDEDVSKEYGHLLPGHRSQDHKVGDEGVSGEEVFAEHGGQARGHRGHGSEDTEDSAEHRHHLPSHRSHSHQDEDEDEVVSSEHHHHILRHGHRGHDGEDDEGEEEEEEEEEEEEASTEYGHQAHRHRGHGSEEDEDVSDGHHHHGPSHRHQGHEEDDDDDDDDDDDDDDDDVSIEYRHQAHRHQGHGIEEDEDVSDGHHHRDPSHRHRSHEEDDNDDDDVSTEYGHQAHRHQDHRKEEVEAVSGEHHHHVPDHRHQGHRDEEEDEDVSTERWHQGPQHVHHGLVDEEEEEEEITVQFGHYVASHQPRGHKSDEEDFQDEYKTEVPHHHHHRVPREEDEEVSAELGHQAPSHRQSHQDEETGHGQRGSIKEMSHHPPGHTVVKDRSHLRKDDSEEEKEKEEDPGSHEEDDESSEQGEKGTHHGSRDQEDEEDEEEGHGLSLNQEEEEEEDKEEEEEEEDEERREERAEVGAPLSPDHSEEEEEEEEGLEEDEPRFTIIPNPLDRREEAGGASSEEESGEDTGPQDAQEYGNYQPGSLCGYCSFCNRCTECESCHCDEENMGEHCDQCQHCQFCYLCPLVCETVCAPGSYVDYFSSSLYQALADMLETPEP

SEQ ID NO: 435 - protein, 205 aa, Homo sapiens
MTERRVPFSLLRGPSWDPFRDWYPHSRLFDQAFGLPRLPEEWSQWLGGSSWPGYVRPLPPAAIESPAVAAPAYSRALSRQLSSGVSEIRHTADRWRVSLDVNHFAPDELTVKTKDGVVEITGKHEERQDEHGYISRCFTRKYTLPPGVDPTQVSSSLSPEGTLTVEAPMPKLATQSNEITIPVTFESRAQLGGPEAAKSDETAAK

SEQ ID NO: 436 - protein, 573 aa, Homo sapiens
MLRLPTVFRQMRPVSRVLAPHLTRAYAKDVKFGADARALMLQGVDLLADAVAVTMGPKGRTVIIEQGWGSPKVTKDGVTVAKSIDLKDKYKNIGAKLVQDVANNTNEEAGDGTTTATVLARSIAKEGFEKISKGANPVEIRRGVMLAVDAVIAELKKQSKPVTTPEEIAQVATISANGDKEIGNIISDAMKKVGRKGVITVKDGKTLNDELEIIEGMKFDRGYISPYFINTSKGQKCEFQDAYVLLSEKKISSIQSIVPALEIANAHRKPLVIIAEDVDGEALSTLVLNRLKVGLQVVAVKAPGFGDNRKNQLKDMAIATGGAVFGEEGLTLNLEDVQPHDLGKVGEVIVTKDDAMLLKGKGDKAQIEKRIQEIIEQLDVTTSEYEKEKLNERLAKLSDGVAVLKVGGTSDVEVNEKKDRVTDALNATRAAVEEGIVLGGGCALLRCIPALDSLTPANEDQKIGIEIIKRTLKIPAMTIAKNAGVEGSLIVEKIMQSSSEVGYDAMAGDFVNMVEKGIIDPTKVVRTALLDAAGVASLLTTAEVVVTEIPKEEKDPGMGAMGGMGGGMGGGMF

SEQ ID NO: 437 - protein, 102 aa, Homo sapiens
MAGQAFRKFLPLFDRVLVERSAAETVTKGGIMLPEKSQGKVLQATVVAVGSGSKGKGGEIQPVSVKVGDKVLLPEYGGTKVVLDDKDYFLFRDGDILGKYVD

SEQ ID NO: 438 - protein, 102 aa, Homo sapiens; identical to SEQ ID NO: 437

SEQ ID NO: 439 - protein, 551 aa, Homo sapiens
MAAPALSWRLPLLILLLPLATSWASAAVNGTSQFTCFYNSRANISCVWSQDGALQDTSCQVHAWPDRRRWNQTCELLPVSQASWACNLILGAPDSQKLTTVDIVTLRVLCREGVRWRVMAIQDFKPFENLRLMAPISLQVVHVETHRCNISWEISQASHYFERHLEFEARTLSPGHTWEEAPLLTLKQKQEWICLETLTPDTQYEFQVRVKPLQGEFTTWSPWSQPLAFRTKPAALGKDTIPWLGHLLVGLSGAFGFIILVYLLINCRNTGPWLKKVLKCNTPDPSKFFSQLSSEHGGDVQKWLSSPFPSSSFSPGGLAPEISPLEVLERDKVTQLLLQQDKVPEPASLSSNHSLTSCFTNQGYFFFHLPDALEIEACQVYFTYDPYSEEDPDEGVAGAPTGSSPQPLQPLSGEDDAYCTFPSRDDLLLFSPSLLGGPSPPSTAPGGSGAGEERMPPSLQERVPRDWDPQPLGPPTPGVPDLVDFQPPPELVLREAGEEVPDAGPREGVSFPWSRPPGQGEFRALNARLPLNTDAYLSLQELQGQDPTHLV

SEQ ID NO: 440 - protein, 514 aa, Homo sapiens
MADYLISGGTSYVPDDGLTAQQLFNCGDGLTYNDFLILPGYIDFTADQVDLTSALTKKITLKTPLVSSPMDTVTEAGMAIAMALTGGIGFIHHNCTPEFQANEVRKVKKYEQGFITDPVVLSPKDRVRDVFEAKARHGFCGIPITDTGRMGSRLVGIISSRDIDFLKEEEHDCFLEEIMTKREDLVVAPRSITLKEANEILQRSKKGKLPIVNEDDELVAIIARTDLKKNRDYPLASKDAKKQLLCGAAIGTHEDDKYRLDLLAQAGVDVVVLDSSQGNSIFQINMIKYIKDKYPNLQVIGGNVVTAAQAKNLIDAGVDALRVGMGSGSICITQEVLACGRPQATAVYKVSEYARRFGVPVIADGGIQNVGHIAKALALGASTVMMGSLLAATTEAPGEYFFSDGIRLKKYRGMGSLDAMDKHLSSQNRYFSEADKIKVAQGVSGAVQDKGSIHKFVPYLIAGIQHSCQDIGAKSLTQVRAMMYSGELKFEKRTSSAQVEGGVHSLHSYEKRLF

SEQ ID NO: 441 - protein, 1257 aa, Homo sapiens
MASCSFTRDQATRRLRGAAAAAAAALAAVVTTPLLSSGTPTALIGTGSSCPGAMWLSTATGSRSDSESEEEDLPVGEEVCKRGYLRKQKHGHRRYFVLKLETADAPARLEYYENARKFRHSVRAAAAAAAAAASGAAIPPLIPPRRVITLYQCFSVSQRADARYRHLIALFTQDEYFAMVAENESEQESWYLLLSRLILESKRRRCGTLGAQPDGEPAALAAAAAAEPPFYKDVWQVIVKPRGLGHRKELSGVFRLCLTDEEVVFVRLNTEVASVVVQLLSIRRCGHSEQYFFLEVGRSTVIGPGELWMQVDDCVVAQNMHELFLEKMRALCADEYRARCRSYSISIGAHLLTLLSARRHLGLVPLEPGGWLRRSRFEQFCHLRAIGDGEDEMLFTRRFVTPSEPVAHSRRGRLHLPRGRRSRRAVSVPASFFRRLAPSPARPRHPAEAPNNGARLSSEVSGSGSGNFGEEGNPQGKEDQEGSGGDYMPMNNWGSGNGRGSGGGQGSNGQGSSSHSSGGNQCSGEGQGSRGGQGSNGQGSGGNQCSRDGQGTAGGHGSGGGQRPGGGHGSGGGQGPGDGHGSGGGKNSGGGKGSGSGKGSDGDGERGKSLKKRSYFGKLTQSKQQQMPPPPPPPPPPPPAGGTGGKGKSGGRFRLYFCVDRGATKECKEAKEVKDAEIPEGAARGPHRARAFDEDEDDPYVPMRPGVATPLVSSSDYMPMAPQNVSASKKRHSRSPFEDSRGYMMMFPRVSPPPAPSPPKAPDTNKEDDSKDNDSESDYMFMAPGAGAIPKNPRNPQGGSSSKSWSSYFSLPNPFRSSPLGQNDNSEYVPMLPGKFLGRGLDKEVSYNWDPKDAASKPSGEGSFSKPGDGGSPSKPSDHEPPKNKAKRPNRLSFITKGYKIKPKPQKPTHEQREADSSSDYVNMDFTKRESNTPAPSTQGLPDSWGIIAEPRQSAFSNYVNVEFGVPFPNPANDLSDLLRAIPRANPLSLDSARWPLPPLPLSATGSNAIEEEGDYIEVIFNSAMTPAMALADSAIRYDAETGRIYVVDPFSECCMDISLSPSRCSEPPPVARLLQEEEQERRRPQSRSQSFFAAARAAVSAFPTDSLERDLSPSSAPAVASAAEPTLALSQVVAAASALAAAPGIGAAAAAAGFDSASARWFQPVANAADAEAVRGAQDVAGGSNPGAHNPSANLARGDNQAGGAAAAAAAPEPPPRSRRVPRPPEREDSDNDDDTHVRMDFARRDNQFDSPKRGR

SEQ ID NO: 442 - protein, 2671 aa, Homo sapiens
MSEMSSFLHIGDIVSLYAEGSVNGFISTLGLVDDRCVVEPAAGDLDNPPKKFRDCLFKVCPMNRYSAQKQYWKAKQTKQDKEKIADVVLLQKLQHAAQMEQKQNDTENKKVHGDVVKYGSVIQLLHMKSNKYLTVNKRLPALLEKNAMRVTLDATGNEGSWLFIQPFWKLRSNGDNVVVGDKVILNPVNAGQPLHASNYELSDNAGCKEVNSVNCNTSWKINLFMQFRDHLEEVLKGGDVVRLFHAEQEKFLTCDEYKGKLQVFLRTTLRQSATSATSSNALWEVEVVHHDPCRGGAGHWNGLYRFKHLATGNYLAAEENPSYKGDASDPKAAGMGAQGRTGRRNAGEKIKYCLVAVPHGNDIASLFELDPTTLQKTDSFVPRNSYVRLRHLCTNTWIQSTNVPIDIEEERPIRLMLGTCPTKEDKEAFAIVSVPVSEIRDLDFANDASSMLASAVEKLNEGFISQNDRRFVIQLLEDLVFFVSDVPNNGQNVLDIMVTKPNRERQKLMREQNILKQVFGILKVPFREKGGEGPLVRLEELSDQKNAPYQHMFRLCYRVLRYSQEDYRKNQEHIAKQFGMMQSQIGYDILAEDTITALLHNNRKLLEKHITKTEVETFVSLVRKNREPRFLDYLSDLCVSNHIAIPVTQELICKCVLDPKNSDILIRTELRPVKEMAQSHEYLSIEYSEEEVWLTWTDKNNEHHEKSVRQLAQEARAGNAHDENVLSYYRYQLKLFARMCLDRQYLAIDEISQQLGVDLIFLCMADEMLPFDLRASFCHLMLHVHVDRDPQELVTPVKFARLWTEIPTAITIKDYDSNLNASRDDKKNKFANTMEFVEDYLNNVVSEAVPFANEEKNKLTFEVVSLAHNLIYFGFYSFSELLRLTRTLLGIIDCVQGPPAMLQAYEDPGGKNVRRSIQGVGHMMSTMVLSRKQSVFSAPSLSAGASAAEPLDRSKFEENEDIVVMETKLKILEILQFILNVRLDYRISYLLSVFKKEFVEVFPMQDSGADGTAPAFDSTTANMNLDRIGEQAEAMFGVGKTSSMLEVDDEGGRMFLRVLIHLTMHDYAPLVSGALQLLFKHFSQRQEAMHTFKQVQLLISAQDVENYKVIKSELDRLRTMVEKSELWVDKKGSGKGEEVEAGTAKDKKERPTDEEGFLHPPGEKSSENYQIVKGILERLNKMCGVGEQMRKKQQRLLKNMDAHKVMLDLLQIPYDKGDAKMMEILRYTHQFLQKFCAGNPGNQALLHKHLHLFLTPGLLEAETMQHIFLNNYQLCSEISEPVLQHFVHLLATHGRHVQYLDFLHTVIKAEGKYVKKCQDMIMTELTNAGDDVVVFYNDKASLAHLLDMMKAARDGVEDHSPLMYHISLVDLLAACAEGKNVYTEIKCTSLVPLEDVVSVVTHEDCITEVKMAYVNFVNHCYVDTEVEMKEIYTSNHIWTLFENFTLDMARVCSKREKRVADPTLEKYVLSVVLDTINAFFSSPFSENSTSLQTHQPVVVQLLQSTTRLLECPWLQQQHKGSVEACIRTLAMVAKGRAILLPMDLDAHISSMLSSGASCAAAAQRNASSYKATTRAFPRVTPTANQWDYKNIIEKLQDIITALEERLKPLVQAELSVLVDVLHWPELLFLEGSEAYQRCESGGFLSKLIQHTKDLMESEEKLCIKVLRTLQQMLVKKTKYGDRGNQLRKMLLQNYLQNRKSTSRGDLPDPIGTGLDPDWSAIAATQCRLDKEGATKLVCDLITSTKNEKIFQESIGLAIHLLDGGNTEIQKSFHNLMMSDKKSERFFKVLHDRMKRAQQETKSTVAVNMNDLGSQPHEDREPVDPTTKGRVASFSIPGSSSRYSLGPSLRRGHEVSERVQSSEMGTSVLIMQPILRFLQLLCENHNRDLQNFLRCQNNKTNYNLVCETLQFLDIMCGSTTGGLGLLGLYINEDNVGLVIQTLETLTEYCQGPCHENQTCIVTHESNGIDIITALILNDISPLCKYRMDLVLQLKDNASKLLLALMESRHDSENAERILISLRPQELVDVIKKAYLQEEERENSEVSPREVGHNIYILALQLSRHNKQLQHLLKPVKRIQEEEAEGISSMLSLNNKQLSQMLKSSAPAQEEEEDPLAYYENHTSQIEIVRQDRSMEQIVFPVPGICQFLTEETKHRLFTTTEQDEQGSKVSDFFDQSSFLHNEMEWQRNVRSMPLIYWFSRRMTLWGSISFNLAVFINIIIAFFYPYMEGASTGVLDSPLISLLFWILICFSIAALFTKRYSIRPLIVALILRSIYYLGIGPTLNILGALNLTNKIVFVVSFVGNRGTFIRGYKAMVMDMEFLYHVGYILTSVLGLFAHELFYSILLFDLIYREETLFNVIKSVTRNGRSILLTALLALILVYLFSIVGFLFLKDDFILEVDRLPNNHSTASPLGMPHGAAAFVDTCSGDKMDCVSGLSVPEVLEEDRELDSTERACDTLLMCIVTVMNHGLRNGGGVGDILRKPSKDESLFPARVVYDLLFFFIVIIIVLNLIFGVIIDTFADLRSEKQKKEEILKTTCFICGLERDKFDNKTVSFEEHIKLEHNMWNYLYFIVLVRVKNKTDYTGPESYVAQMIKNKNLDWFPRMRAMSLVSNEGEGEQNEIRILQDKLNSTMKLVSHLTAQLNELKEQMTEQRKRRQRLGFVDVQNCISR

SEQ ID NO: 443 - protein, 485 aa, Homo sapiens
MGEPGFFVTGDRAGGRSWCLRRVGMSAGWLLLEDGCEVTVGRGFGVTYQLVSKICPLMISRNHCVLKQNPEGQWTIMDNKSLNGVWLNRARLEPLRVYSIHQGDYIQLGVPLENKENAEYEYEVTEEDWETIYPCLSPKNDQMIEKNKELRTKRKFSLDELAGPGAEGPSNLKSKINKVSCESGQPVKSQGKGEVASTPSDNLDPKLTALEPSKTTGAPIYPGFPKVTEVHHEQKASNSSASQRSLQMFKVTMSRILRLKIQMQEKHEAVMNVKKQTQKGNSKKVVQMEQELQDLQSQLCAEQAQQQARVEQLEKTFQEEEQHLQGLEIAQGEKDLKQQLAQALQEHWALMEELNRSKKDFEAIIQAKNKELEQTKEEKEKMQAQKEEVLSHMNDVLENELQCIICSEYFIEAVTLNCAHSFCSYCINEWMKRKIECPICRKDIKSKTYSLVLDNCINKMVNNLSSEVKERRIVLIRERKAKRLF

SEQ ID NO: 444 - protein, 860 aa, Homo sapiens [sequence omitted]

SEQ ID NO: 445 - protein, 202 aa, Homo sapiens
MKVLAAGVVPLLLVLHWKHGAGSPLPITPVNATCAIRHPCHNNLMNQIRSQLAQLNGSANALFILYYTAQGEPFPNNLDKLCGPNVTDFPPFHANGTEKAKLVELYRIVVYLGTSLGNITRDQKILNPSALSLHSKLNATADILRGLLSNVLCRLCSKYHVGHVDVTYGPDTSGKDVFQKKKLGCQLLGKYKQIIAVLAQAF

SEQ ID NO: 446 - protein, 1588 aa, Homo sapiens
MVQKKKFCPRLLDYLVIVGARHPSSDSVAQTPELLRRYPLEDHTEFPLPPDVVFFCQPEGCLSVRQRRMSLRDDTSFVFTLTDKDTGVTRYGICVNFYRSFQKRISKEKGEGGAGSRGKEGTHATCASEEGGTESSESGSSLQPLSADSTPDVNQSPRGKRRAKAGSRSRNSTLTSLCVLSHYPFFSTFRECLYTLKRLVDCCSERLLGKKLGIPRGVQRDTMWRIFTGSLLVEEKSSALLHDLREIEAWIYRLLRSPVPVSGQKRVDIEVLPQELQPALTFALPDPSRFTLVDFPLHLPLELLGVDACLQVLTCILLEHKVVLQSRDYNALSMSVMAFVAMIYPLEYMFPVIPLLPTCMASAEQLLLAPTPYIIGVPASFFLYKLDFKMPDDVWLVDLDSNRVIAPTNAEVLPILPEPESLELKKHLKQALASMSLNTQPILNLEKFHEGQEIPLLLGRPSNDLQSTPSTEFNPLIYGNDVDSVDVATRVAMVRFFNSANVLQGFQMHTRTLRLFPRPVVAFQAGSFLASRPRQTPFAEKLARTQAVEYFGEWILNPTNYAFQRIHNNMFDPALIGDKPKWYAHQLQPIHYRVYDSNSQLAEALSVPPERDSDSEPTDDSGSDSMDYDDSSSSYSSLGDFVSEMMKCDINGDTPNVDPLTHAALGDASEVEIDELQNQKEAEEPGPDSENSQENPPLRSSSSTTASSSPSTVIHGANSEPADSTEMDDKAAVGVSKPLPSVPPSIGKSNMDRRQAEIGEGSVRRRIYDNPYFEPQYGFPPEEDEDEQGESYTPRFSQHVSGNRAQKLLRPNSLRLASDSDAESDSRASSPNSTVSNTSTEGFGGIMSFASSLYRNHSTSFSLSNLTLPTKGAREKATPFPSLKGNRRALVDQKSSVIKHSPTVKREPPSPQGRSSNSSENQQFLKEVVHSVLDGQGVGWLNMKKVRRLLESEQLRVFVLSKLNRMVQSEDDARQDIIPDVEISRKVYKGMLDLLKCTVLSLEQSYAHAGLGGMASIFGLLEIAQTHYYSKEPDKRKRSPTESVNTPVGKDPGLAGRGDPKAMAQLRVPQLGPRAPSATGKGPKELDTRSLKEENFIASIGPEVIKPVFDLGETEEKKSQISADSGVSLTSSSQRTDQDSVIGVSPAVMIRSSSQDSEVSTVVSNSSGETLGADSDLSSNAGDGPGGEGSVHLASSRGTLSDSEIETNSATSTIFGKAHSLKPSIKEKLAGSPIRTSEDVSQRVYLYEGLLGKERSTLWDQMQFWEDAFLDAVMLEREGMGMDQGPQEMIDRYLSLGEHDRKRLEDDEDRLLATLLHNLISYMLLMKVNKNDIRKKVRRLMGKSHIGLVYSQQINEVLDQLANLNGRDLSIWSSGSRHMKKQTFVVHAGTDTNGDIFFMEVCDDCVVLRSNIGTVYERWWYEKLINMTYCPKTKVLCLWRRNGSETQLNKFYTKKCRELYYCVKDSMERAAARQQSIKPGPELGGEFPVQDLKTGEGGLLQVTLEGINLKFMHNQVFIELNHIKKCNTVRGVFVLEEFVPEIKEVVSHKYKTPMAHEICYSVLCLFSYVAAVHSSEEDLRTPPRPVSS

SEQ ID NO: 447 - protein, 520 aa, Homo sapiens
MSNKCDVVVVGGGISGMAAAKLLHDSGLNVVVLEARDRVGGRTYTLRNQKVKYVDLGGSYVGPTQNRILRLAKELGLETYKVNEVERLIHHVKGKSYPFRGPFPPVWNPITYLDHNNFWRTMDDMGREIPSDAPWKAPLAEEWDNMTMKELLDKLCWTESAKQLATLFVNLCVTAETHEVSALWFLWYVKQCGGTTRIISTTNGGQERKFVGGSGQVSERIMDLLGDRVKLERPVIYIDQTRENVLVETLNHEMYEAKYVISAIPPTLGMKIHFNPPLPMMRNQMITRVPLGSVIKCIVYYKEPFWRKKDYCGTMIIDGEEAPVAYTLDDTKPEGNYAAIMGFILAHKARKLARLTKEERLKKLCELYAKVLGSLEALEPVHYEEKNWCEEQYSGGCYTTYFPPGILTQYGRVLRQPVDRIYFAGTETATHWSGYMEGAVEAGERAAREILHAMGKIPEDEIWQSEPESVDVPAQPITTTFLERHLPSVPGLLRLIGLTTIFSATALGFLAHKRGLLVRV

SEQ ID NO: 448 - protein, 520 aa, Homo sapiens; identical to SEQ ID NO: 447

SEQ ID NO: 449 - protein, 584 aa, Homo sapiens
MLSRLRVVSTTCTLACRHLHIKEKGKPLMLNPRTNKGMAFTLQERQMLGLQGLLPPKIETQDIQALRFHRNLKKMTSPLEKYIYIMGIQERNEKLFYRILQDDIESLMPIVYTPTVGLACSQYGHIFRRPKGLFISISDRGHVRSIVDNWPENHVKAVVVTDGERILGLGDLGVYGMGIPVGKLCLYTACAGIRPDRCLPVCIDVGTDNIALLKDPFYMGLYQKRDRTQQYDDLIDEFMKAITDRYGRNTLIQFEDFGNHNAFRFLRKYREKYCTFNDDIQGTAAVALAGLLAAQKVISKPISEHKILFLGAGEAALGIANLIVMSMVENGLSEQEAQKKIWMFDKYGLLVKGRKAKIDSYQEPFTHSAPESIPDTFEDAVNILKPSTIIGVAGAGRLFTPDVIRAMASINERPVIFALSNPTAQAECTAEEAYTLTEGRCLFASGSPFGPVKLTDGRVFTPGQGNNVYIFPGVALAVILCNTRHISDSVFLEAAKALTSQLTDEELAQGRLYPPLANIQEVSINIAIKVTEYLYANKMAFRYPEPEDKAKYVKERTWRSEYDSLLPDVYEWPESASSPPVITE

SEQ ID NO: 450 - protein, 584 aa, Homo sapiens; identical to SEQ ID NO: 449

SEQ ID NO: 451 - protein, 626 aa, Homo sapiens
MDEQEALNSIMNDLVALQMNRRHRMPGYETMKNKDTGHSNRQSDVRIKFEHNGERRIIAFSRPVKYEDVEHKVTTVFGQPLDLHYMNNELSILLKNQDDLDKAIDILDRSSSMKSLRILLLSQDRNHNSSSPHSEVSRQVRIKASQSAGDINTIYQPPEPRSRHLSVSSQNPGRSSPPPGYVPERQQHIARQGSYTSINSEGEFIPETSEQCMLDPLSSAENSLSGSCQSLDRSADSPSFRKSRMSRAQSFPDNRQEYSDRETQLYDKGVKGGTYPRRYHVSVHHKDYSDGRRTFPRIRRHQGNLFTLVPSSRSLSTNGENMGLAVQYLDPRGRLRSADSENALSVQERNVPTKSPSAPINWRRGKLLGQGAFGRVYLCYDVDTGRELASKQVQFDPDSPETSKEVSALECEIQLLKNLQHERIVQYYGCLRDRAEKTLTIFMEYMPGGSVKDQLKAYGALTESVTRKYTRQILEGMSYLHSNMIVHRDIKGANILRDSAGNVKLGDFGASKRLQTICMSGTGMRSVTGTPYWMSPEVISGEGYGRKADVWSLGCTVVEMLTEKPPWAEYEAMAAIFKIATQPTNPQLPSHISEHGRDFLRRIFVEARQRPSAEELLTHHFAQLMY

SEQ ID NO: 452 - protein, 1128 aa, Homo sapiens
MSRRKPASGGLAASSSAPARQAVLSRFFQSTGSLKSTSSSTGAADQVDPGAAAAAAPPAPAFPPQLPPHVATEIDRRKKRPLENDGPVKKKVKKVQQKEGGSDLGMSGNSEPKKCLRTRNVSKSLEKLKEFCCDSALPQSRVQTESLQERFAVLPKCTDFDDISLLHAKNAVSSEDSKRQINQKDTTLFDLSQFGSSNTSHENLQKTASKSANKRSKSIYTPLELQYIEMKQQHKDAVLCVECGYKYRFFGEDAEIAARELNIYCHLDHNFMTASIPTHRLFVHVRRLVAKGYKVGVVKQTETAALKAIGDNRSSLFSRKLTALYTKSTLIGEDVNPLIKLDDAVNVDEIMTDTSTSYLLCISENKENVRDKKKGNIFIGIVGVQPATGEVVFDSFQDSASRSELETRMSSLQPVELLLPSALSEQTEALIHRATSVSVQDDRIRVERMDNIYFEYSHAFQAVTEFYAKDTVDIKGSQIISGIVNLEKPVICSLAAIIKYLKEFNLEKMLSKPENFKQLSSKMEFMTINGTTLRNLEILQNQTDMKTKGSLLWVLDHTKTSFGRRKLKKWVTQPLLKLREINARLDAVSEVLHSESSVFGQIENHLRKLPDIERGLCSIYHKKCSTQEFFLIVKTLYHLKSEFQAIIPAVNSHIQSDLLRTVILEIPELLSPVEHYLKILNEQAAKVGDKTELFKDLSDFPLIKKRKDEIQGVIDEIRMHLQEIRKILKNPSAQYVTVSGQEFMIEIKNSAVSCIPTDWVKVGSTKAVSRFHSPFIVENYRHLNQLREQLVLDCSAEWLDFLEKFSEHYHSLCKAVHHLATVDCIFSLAKVAKQGDYCRPTVQEERKIVIKNGRHPVIDVLLGEQDQYVPNNTDLSEDSERVMIITGPNMGGKSSYIKQVALITIMAQIGSYVPAEEATIGIVDGIFTRMGAADNIYKGRSTFMEELTDTAEIIRKATSQSLVILDELGRGTSTHDGIAIAYATLEYFIRDVKSLTLFVTHYPPVCELEKNYSHQVGNYHMGFLVSEDESKLDPGAAEQVPDFVTFLYQITRGIAARSYGLNVAKLADVPGEILKKAAHKSKELEGLINTKRKRLKYFAKLWTMHNAQDLQKWTEEFNMEETQTSLLH

SEQ ID NO: 453 - protein, 577 aa, Homo sapiens
MPKTISVRVTTMDAELEFAIQPNTTGKQLFDQVVKTIGLREVWFFGLQYQDTKGFSTWLKLNKKVTAQDVRKESPLLFKFRAKFYPEDVSEELIQDITQRLFFLQVKEGILNDDIYCPPETAVLLASYAVQSKYGDFNKEVHKSGYLAGDKLLPQRVLEQHKLNKDQWEERIQVWHEEHRGMLREDAVLEYLKIAQDLEMYGVNYFSIKNKKGSELWLGVDALGLNIYEQNDRLTPKIGFPWSEIRNISFNDKKFVIKPIDKKAPDFVFYAPRLRINKRILALCMGNHELYMRRRKPDTIEVQQMKAQAREEKHQKQMERAMLENEKKKREMAEKEKEKIEREKEELMERLKQIEEQTKKAQQELEEQTRRALELEQERKRAQSEAEKLAKERQEAEEAKEALLQASRDQKKTQEQLALEMAELTARISQLEMARQKKESEAVEWQQKAQMVQEDLEKTRAELKTAMSTPHVAEPAENEQDEQDENGAEASADLRADAMAKDRSEEERTTEAEKNERVQKHLKALTSELANARDESKKTANDMIHAENMRLGRDKYKTLRQIRQGNTKQRIDEFESM

SEQ ID NO: 454 - protein, 577 aa, Homo sapiens; identical to SEQ ID NO: 453

SEQ ID NO: 455 - protein, 99 aa, Homo sapiens
MAAAAASRGVGAKLGLREIRIHLCQRSPGSQGVRDFIEKRYVELKKANPDLPILIRECSDVQPKLWARYAFGQETNVPLNNFSADQVTRALENVLSGKA

SEQ ID NO: 456 - protein, 81 aa, Homo sapiens
MLRQIIGQAKKHPSLIPLFVFIGTGATGATLYLLRLALFNPDVCWDRNNPEPWNKLGPNDQYKFYSVNVDYSKLKKERPDF

SEQ ID NO: 457 - protein, 128 aa, Homo sapiens
MAGSGVRQATSTASTFVKPIFSRDMNEAKRRVRELYRAWYREVPNTVHQFQLDITVKMGRDKVREMFMKNAHVTDPRVVDLLVIKGKIELEETIKVWKQRTHVMRFFHETEAPRPKDFLSKFYVGHDP

SEQ ID NO: 458 - protein, 98 aa, Homo sapiens
MAHEHGHEHGHHKMELPDYRQWKIEGTPLETIQKKLAAKGLRDPWGRNEAWRYMGGFAKSVSFSDVFFKGFKWGFAAFVVAVGAEYYLESLNKDKKHH

SEQ ID NO: 459 - protein, 189 aa, Homo sapiens
MAAMSLLRRVSVTAVAALSGRPLGTRLGFGGFLTRGFPKAAAPVRHSGDHGKRLFVIRPSRFYDRRFLKLLRFYIALTGIPVAIFITLVNVFIGQAELAEIPEGYVPEHWEYYKHPISRWIARNFYDSPEKIYERTMAVLQIEAEKAELRVKELEVRKLMHVRGDGPWYYYETIDKELIDHSPKATPDN

SEQ ID NO: 460 - protein, 128 aa, Homo sapiens
MTGYTPDEKLRLQQLRELRRRWLKDQELSPREPVLPPQKMGPMEKFWNKFLENKSPWRKMVHGVYKKSIFVFTHVLVPVWIIHYYMKYHVSEKPYGIVEKKSRIFPGDTILETGEVIPPMKEFPDQHH

SEQ ID NO: 461 - protein, 76 aa, Homo sapiens
MAPSALLRPLSRLLAPARLPSGPSVRSKFYVREPPNAKPDWLKVGFTLGTTVFLWIYLIKQHNEDILEYKRRNGLE

SEQ ID NO: 462 - protein, 175 aa, Homo sapiens
MAAVSMSVVLRQTLWRRRAVAVAALSVSRVPTRSLRTSTWRLAQDQTQDTQLITVDEKLDITTLTGVPEEHIKTRKVRIFVPARNNMQSGVNNTKKWKMEFDTRERWENPLMGWASTADPLSNMVLTFSTKEDAVSFAEKNGWSYDIEERKVPKPKSKSYGANFSWNKRTRVSTK

SEQ ID NO: 463 - protein, 210 aa, Homo sapiens
MRCLTTPMLLRALAQAARAGPPGGRSLHSSAVAATYKYVNMQDPEMDMKSVTDRAARTLLWTELFRGLGMTLSYLFREPATINYPFEKGPLSPRFRGEHALRRYPSGEERCIACKLCEAICPAQAITIEAEPRADGSRRTTRYDIDMTKCIYCGFCQEACPVDAIVEGPNFEFSTETHEELLYNKEKLLNNGDKWEAEIAANIQADYLYR

SEQ ID NO: 464 - protein, 1461 aa, Homo sapiens
MAAERGARRLLSTPSFWLYCLLLLGRRAPGAAAARSGSAPQSPGASIRTFTPFYFLVEPVDTLSVRGSSVILNCSAYSEPSPKIEWKKDGTFLNLVSDDRRQLLPDGSLFISNVVHSKHNKPDEGYYQCVATVESLGTIISRTAKLIVAGLPRFTSQPEPSSVYAGNGAILNCEVNADLVPFVRWEQNRQPLLLDDRVIKLPSGMLVISNATEGDGGLYRCVVESGGPPKYSDEVELKVLPDPEVISDLVFLKQPSPLVRVIGQDVVLPCVASGLPTPTIKWMKNEEALDTESSERLVLLAGGSLEISDVTEDDAGTYFCIADNGNETIEAQAELTVQAQPEFLKQPTNIYAHESMDIVFECEVTGKPTPTVKWVKNGDMVIPSDYFKIVKEHNLQVLGLVKSDEGFYQCIAENDVGNAQAGAQLIILEHAPATTGPLPSAPRDVVASLVSTRFIKLTWRTPASDPHGDNLTYSVFYTKEGIARERVENTSHPGEMQVTIQNLMPATVYIFRVMAQNKHGSGESSAPLRVETQPEVQLPGPAPNLRAYAASPTSITVTWETPVSGNGEIQNYKLYYMEKGTDKEQDVDVSSHSYTINGLKKYTEYSFRVVAYNKHGPGVSTPDVAVRTLSDVPSAAPQNLSLEVRNSKSIMIHWQPPAPATQNGQITGYKIRYRKASRKSDVTETLVSGTQLSQLIEGLDRGTEYNFRVAALTINGTGPATDWLSAETFESDLDETRVPEVPSSLHVRPLVTSIVVSWTPPENQNIVVRGYAIGYGIGSPHAQTIKVDYKQRYYTIENLDPSSHYVITLKAFNNVGEGIPLYESAVTRPHTDTSEVDLFVINAPYTPVPDPTPMMPPVGVQASILSHDTIRITWADNSLPKHQKITDSRYYTVRWKTNIPANTKYKNANATTLSYLVTGLKPNTLYEFSVMVTKGRRSSTWSMTAHGTTFELVPTSPPKDVTVVSKEGKPKTIIVNWQPPSEANGKITGYIIYYSTDVNAEIHDWVIEPVVGNRLTHQIQELTLDTPYYFKIQARNSKGMGPMSEAVQFRTPKADSSDKMPNDQASGSGGKGSRLPDLGSDYKPPMSGSNSPHGSPTSPLDSNMLLVIIVSVGVITIVVVVIIAVFCTRRTTSHQKKKRAACKSVNGSHKYKGNSKDVKPPDLWIHHERLELKPIDKSPDPNPIMTDTPIPRNSQDITPVDNSMDSNIHQRRNSYRGHESEDSMSTLAGRRGMRPKMMMPFDSQPPQPVISAHPIHSLDNPHHHFHSSSLASPARSHLYHPGSPWPIGTSMSLSDRANSTESVRNTPSTDTMPASSSQTCCTDHQDPEGATSSSYLASSQEEDSGQSLPTAHVRPSHPLKSFAVPAIPPPGPPTYDPALPSTPLLSQQALNHHIHSVKTASIGTLGRSRPPMPVVVPSAPEVQETTRMLEDSESSYEPDELTKEMAHLEGLMKDLNAITTA

SEQ ID NO: 465 - protein, 284 aa, Homo sapiens
MAPRLCSISVTARRLLGGPGPRAGDVASAAAARFYSKDNEGSWFRSLFVHKVDPRKDAHSTLLSKKETSNLYKIQFHNVKPEYLDAYNSLTEAVLPKLHLDEDYPCSLVGNWNTWYGEQDQAVHLWRFSGGYPALMDCMNKLKNNKEYLEFRRERTQMLLSRRNQLLLEFSFWNEPQPRMGPNIYELRTYKLKPGTMIEWGNNWARAIKYRQENQEAVGGFFSQIGELYVVHHLWAYKDLQSREETRNAAWRKRGWDENVYYTVPLVRHMESRIMIPLKISPLQ

SEQ ID NO: 466 - protein, 560 aa, Homo sapiens
MECLYYFLGFLLLAARLPLDAAKRFHDVLGNERPSAYMREHNQLNGWSSDENDWNEKLYPVWKRGDMRWKNSWKGGRVQAVLTSDSPALVGSNITFAVNLIFPRCQKEDANGNIVYEKNCRNEAGLSADPYVYNWTAWSEDSDGENGTGQSHHNVFPDGKPFPHHPGWRRWNFIYVFHTLGQYFQKLGRCSVRVSVNTANVTLGPQLMEVTVYRRHGRAYVPIAQVKDVYVVTDQIPVFVTMFQKNDRNSSDETFLKDLPIMFDVLIHDPSHFLNYSTINYKWSFGDNTGLFVSTNHTVNHTYVLNGTFSLNLTVKAAAPGPCPPPPPPPRPSKPTPSLGPAGDNPLELSRIPDENCQINRYGHFQATITIVEGILEVNIIQMTDVLMPVPWPESSLIDFVVTCQGSIPTEVCTIISDPTCEITQNTVCSPVDVDEMCLLTVRRTFNGSGTYCVNLTLGDDTSLALTSTLISVPDRDPASPLRMANSALISVGCLAIFVTVISLLVYKKHKEYNPIENSPGNVVRSKGLSVFLNRAKAVFFPGNQEKDPLLKNQEFKGVS

SEQ ID NO: 467 - protein, 199 aa, Homo sapiens
MSSGNAKIGHPAPNFKATAVMPDGQFKDISLSDYKGKYVVFFFYPLDFTFVCPTEIIAFSDRAEEFKKLNCQVIGASVDSHFCHLAWVNTPKKQGGLGPMNIPLVSDPKRTIAQDYGVLKADEGISFRGLFIIDDKGILRQITVNDLPVGRSVDETLRLVQAFQFTDKHGEVCPAGWKPGSDTIKPDVQKSKEYFSKQK

SEQ ID NO: 468 - protein, 187 aa, Homo sapiens
MPVDLSKWSGPLSLQEVDEQPQHPLHVTYAGAAVDELGKVLTPTQVKNRPTSISWDGLDSGKLYTLVLTDPDAPSRKDPKYREWHHFLVVNMKGNDISSGTVLSDYVGSGPPKGTGLHRYVWLVYEQDRPLKCDEPILSNRSGDHRGKFKVASFRKKYELRAPVAGTCYQAEWDDYVPKLYEQLSGK

SEQ ID NO: 469 - protein, 390 aa, Homo sapiens
MRKMLAAVSRVLSGASQKPASRVLVASRNFANDATFEIKKCDLHRLEEGPPVTTVLTREDGLKYYRMMQTVRRMELKADQLYKQKIIRGFCHLCDGQEACCVGLEAGINPTDHLITAYRAHGFTFTRGLSVREILAELTGRKGGCAKGKGGSMHMYAKNFYGGNGIVGAQVPLGAGIALACKYNGKDEVCLTLYGDGAANQGQIFEAYNMAALWKLPCIFICENNRYGMGTSVERAAASTDYYKRGDFIPGLRVDGMDILCVREATRFAAAYCRSGKGPILMELQTYRYHGHSMSDPGVSYRTREEIQEVRSKSDPIMLLKDRMVNSNLASVEELKEIDVEVRKEIEDAAQFATADPEPPLEELGYHIYSSDPPFEVRGANQWIKFKSVS

SEQ ID NO: 470 - protein, 359 aa, Homo sapiens
MAAVSGLVRRPLREVSGLLKRRFHWTAPAALQVTVRDAINQGMDEELERDEKVFLLGEEVAQYDGAYKVSRGLWKKYGDKRIIDTPISEMGFAGIAVGAAMAGLRPICEFMTFNFSMQAIDQVINSAAKTYYMSGGLQPVPIVFRGPNGASAGVAAQHSQCFAAWYGHCPGLKVVSPWNSEDAKGLIKSAIRDNNPVVVLENELMYGVPFEFLPEAQSKDFLIPIGKAKIERQGTHITVVSHSRPVGHCLEAAAVLSKEGVECEVINMRTIRPMDMETIEASVMKTNHLVTVEGGWPQFGVGAEICARIMEGPAFNFLDAPAVRVTGADVPMPYAKILEDNSIPQVKDIIFAIKKTLNI

SEQ ID NO: 471 - protein, 411 aa, Homo sapiens
MKAARFVLRSAGSLNGAGLVPREVEHFSRYSPSPLSMKQLLDFGSENACERTSFAFLRQELPVRLANILKEIDILPTQLVNTSSVQLVKSWYIQSLMDLVEFHEKSPDDQKALSDFVDTLIKVRNRHHNVVPTMAQGIIEYKDACTVDPVTNQNLQYFLDRFYMNRISTRMLMNQHILIFSDSQTGNPSHIGSIDPNCDVVAVVQDAFECSRMLCDQYYLSSPELKLTQVNGKFPDQPIHIVYVPSHLHHMLFELFKNAMRATVEHQENQPSLTPIEVIVVLGKEDLTIKISDRGGGVPLRIIDRLFSYTYSTAPTPVMDNSRNAPLAGFGYGLPISRLYAKYFQGDLNLYSLSGYGTDAIIYLKALSSESIEKLPVFNKSAFKHYQMSSEADDWCIPSREPKNLAKEVAM

SEQ ID NO: 472 - protein, 247 aa, Homo sapiens
MDAFTRFTNQTQGRDRLFRATQYTCMLLRYLLEPKAGKEKVVMKLKKLESSVSTGRKWFRLGNVVHAIQATEQSIHATDLVPRLCLTLANLNRVIYFICDTILWVRSVGLTSGINKEKWRTRAAHHYYYSLLLSLVRDLYEISLQMKRVTCDRAKKEKSASQDPLWFSVAEEETEWLQSFLLLLFRSLKQHPPLLLDTVKNLCDILNPLDQLGIYKSNPGIIGLGGLVSSIAGMITVAYPQMKLKTR

SEQ ID NO: 473 - protein, 272 aa, Homo sapiens
MAAKVFESIGKFGLALAVAGGVVNSALYNVDAGHRAVIFDRFRGVQDIVVGEGTHFLIPWVQKPIIFDCRSRPRNVPVITGSKDLQNVNITLRILFRPVASQLPRIFTSIGEDYDERVLPSITTEILKSVVARFDAGELITQRELVSRQVSDDLTERAATFGLILDDVSLTHLTFGKEFTEAVEAKQVAQQEAERARFVVEKAEQQKKAAIISAEGDSKAAELIANSLATAGDGLIELRKLEAAEDIAYQLSRSRNITYLPAGQSVLLQLPQ

SEQ ID NO: 474 - protein, 361 aa, Homo sapiens
MFSSVAHLARANPFNTPHLQLVHDGLGDLRSSSPGPTGQPRRPRNLAAAAVEEYSCEFGSAKYYALCGFGGVLSCGLTHTAVVPLDLVKCRMQVDPQKYKGIFNGFSVTLKEDGVRGLAKGWAPTFLGYSMQGLCKFGFYEVFKVLYSNMLGEENTYLWRTSLYLAASASAEFFADIALAPMEAAKVRIQTQPGYANTLRDAAPKMYKEEGLKAFYKGVAPLWMRQIPYTMMKFACFERTVEALYKFVVPKPRSECSKPEQLVVTFVAGYIAGVFCAIVSHPADSVVSVLNKEKGSSASLVLKRLGFKGVWKGLFARIIMIGTLTALQWFIYDSVKVYFRLPRPPPPEMPESLKKKLGLTQ

SEQ ID NO: 475 - protein, 361 aa, Homo sapiens; identical to SEQ ID NO: 474

SEQ ID NO: 476 - protein, 887 aa, Homo sapiens
MGEAEKFHYIYSCDLDINVQLKIGSLEGKREQKSYNAVLEDPMLKFSGLYQETCSDLYVTCQVFAEGKPSALPVRTSYKAFSTRWNWNEWLKLPVKYPDLPRNAQVALTIWDVYGPGKAVPVGGTTVSLFGKYGMSRQGMHDLKVWPNVEADGSEPTNTPGRTSSTLSEDQMSRLAKLTKAHRQGHMVKVDWLDRLTFREIEMINESVKRSSNFMYLMGGFRCVKCDDKEYGIVYYEKDGDESSPILTSFELVKVPDPQMSLENLVESKHHNLPRSLRSGPSDHDLKPYPSPRDQLKNIVSYPPSKPPTYEEQDLVWEFRYYLTNQDKALTKILTSVIWDLPQGAKQALALLGKWNPMDVEDSLELISSHYTNPTVRRYAVARLRQADDEDLLMYLSQLVQALKYENFDDIKNGLEPTKKDSQSSVSGNVSNSGINSAEIDSSQIITSPLPSVSSPPPASKTKEVPDGENLEQDLCTFLISRASKNSTLANYLYWYVIVECEDQDTQQRDPKTHEMYLNVMRRFSQALLKGDKSVRVMRSLLAAQQTFVDRLVHLMKAVQRESGNRKKKNERLQALLGDNEKMNLSDVELIPLPLEPQVKIRGIIPETATLFKSALMPAQLFFKTEDGGKYPVIFKHGDDLRQDQLILQIISLMDKLLRKENLDLKLTPYKVLATSTKHGFMQFIQSVPVAEVLDTEGSIQNFFRKYAPSENGPNGISAEVMDTYVKSCAGYCVITYILGVGDRHLDNLVLTKTGKLFHIDFGYILGRDPKPLPPPMKLNKEMVEGMGGTQSEQYQEFRKQCYTAFLHLRRYSNLILNLFSLMVDPNIPDIALEPDKTVKKVQDKFRLDLSDEEAVHYMQSLIDESVHALFAAVVEQIHKFAQYWRK

SEQ ID NO: 477 - protein, 1290 aa, Homo sapiens
MAGAASPCANGCGPGAPSDAEVLHLCRSLEVGTVMTLFYSKKSQRPERKTFQVKLETRQITWSRGADKIEGAIDIREIKEIRPGKTSRDFDRYQEDPAFRPDQSHCFVILYGMEFRLKTLSLQATSEDEVNMWIKGLTWLMEDTLQAPTPLQIERWLRKQFYSVDRNREDRISAKDLKNMLSQVNYRVPNMRFLRERLTDLEQRSGDITYGQFAQLYRSLMYSAQKTMDLPFLEASTLRAGERPELCRVSLPEFQQFLLDYQGELWAVDRLQVQEFMLSFLRDPLREIEEPYFFLDEFVTFLFSKENSVWNSQLDAVCPDTMNNPLSHYWISSSHNTYLTGDQFSSESSLEAYARCLRMGCRCIELDCWDGPDGMPVIYHGHTLTTKIKFSDVLHTIKEHAFVASEYPVILSIEDHCSIAQQRNMAQYFKKVLGDTLLTKPVEISADGLPSPNQLKRKILIKHKKLAEGSAYEEVPTSMMYSENDISNSIKNGILYLEDPVNHEWYPHYFVLTSSKIYYSEETSSDQGNEDEEEPKEVSSSTELHSNEKWFHGKLGAGRDGRHIAERLLTEYCIETGAPDGSFLVRESETFVGDYTLSFWRNGKVQHCRIHSRQDAGTPKFFLTDNLVFDSLYDLITHYQQVPLRCNEFEMRLSEPVPQTNAHESKEWYHASLTRAQAEHMLMRVPRDGAFLVRKRNEPNSYAISFRAEGKIKHCRVQQEGQTVMLGNSEFDSLVDLISYYEKHPLYRKMKLRYPINEEALEKIGTAEPDYGALYEGRNPGFYVEANPMPTFKCAVKALFDYKAQREDELTFIKSAIIQNVEKQEGGWWRGDYGGKKQLWFPSNYVEEMVNPVALEPEREHLDENSPLGDLLRGVLDVPACQIAIRPEGKNNRLFVFSISMASVAHWSLDVAADSQEELQDWVKKIREVAQTADARLTEGKIMERRKKIALELSELVVYCRPVPFDEEKIGTERACYRDMSSFPETKAEKYVNKAKGKKFLQYNRLQLSRIYPKGQRLDSSNYDPLPMWICGSQLVALNFQTPDKPMQMNQALFMTGRHCGYVLQPSTMRDEAFDPFDKSSLRGLEPCAISIEVLGARHLPKNGRGIVCPFVEIEVAGAEYDSTKQKTEFVVDNGLNPVWPAKPFHFQISNPEFAFLRFVVYEEDMFSDQNFLAQATFPVKGLKTGYRAVPLKNNYSEDLELASLLIKIDIFPAKENGDLSPFSGTSLRERGSDASGQLFHGRAREGSFESRYQQPFEDFRISQEHLADHFDSRERRAPRRTRVNGDNRL

SEQ ID NO: 478 - protein, 52 aa, Homo sapiens
MEKVQYLTRSAIRRASTIEMPQQARQKLQNLFINFCLILICLLLICIIVMLL

SEQ ID NO: 479 - protein, 152 aa, Homo sapiens
MADSERLSAPGCWAACTNFSRTRKGILLFAEIILCLVILICFSASTPGYSSLSVIEMILAAIFFVVYMCDLHTKIPFINWPWSDFFRTLIAAILYLITSIVVLVERGNHSKIVAGVLGLIATCLFGYDAYVTFPVRQPRHTAAPTDPADGPV

SEQ ID NO: 480 - protein, 132 aa, Homo sapiens
MSNKFLGTWKLVSSENFDDYMKALGVGLATRKLGNLAKPTVIISKKGDIITIRTESTFKNTEISFKLGQEFEETTADNRKTKSIVTLQRGSLNQVQRWDGKETTIKRKLVNGKMVAECKMKGVVCTRIYEKV

SEQ ID NO: 481 - protein, 932 aa, Homo sapiens
MKQLPAATVRLLSSSQIITSVVSVVKELIENSLDAGATSVDVKLENYGFDKIEVRDNGEGIKAVDAPVMAMKYYTSKINSHEDLENLTTYGFRGEALGSICCIAEVLITTRTAADNFSTQYVLDGSGHILSQKPSHLGQGTTVTALRLFKNLPVRKQFYSTAKKCKDEIKKIQDLLMSFGILKPDLRIVFVHNKAVIWQKSRVSDHKMALMSVLGTAVMNNMESFQYHSEESQIYLSGFLPKCDADHSFTSLSTPERSFIFINSRPVHQKDILKLIRHHYNLKCLKESTRLYPVFFLKIDVPTADVDVNLTPDKSQVLLQNKESVLIALENLMTTCYGPLPSTNSYENNKTDVSAADIVLSKTAETDVLFNKVESSGKNYSNVDTSVIPFQNDMHNDESGKNTDDCLNHQISIGDFGYGHCSSEISNIDKNTKNAFQDISMSNVSWENSQTEYSKTCFISSVKHTQSENGNKDHIDESGENEEEAGLENSSEISADEWSRGNILKNSVGENIEPVKILVPEKSLPCKVSNNNYPIPEQMNLNEDSCNKKSNVIDNKSGKVTAYDLLSNRVIKKPMSASALFVQDHRPQFLIENPKTSLEDATLQIEELWKTLSEEEKLKYEEKATKDLERYNSQMKRAIEQESQMSLKDGRKKIKPTSAWNLAQKHKLKTSLSNQPKLDELLQSQIEKRRSQNIKMVQIPFSMKNLKINFKKQNKVDLEEKDEPCLIHNLRFPDAWLMTSKTEVMLLNPYRVEEALLFKRLLENHKLPAEPLEKPIMLTESLFNGSHYLDVLYKMTADDQRYSGSTYLSDPRLTANGFKIKLIPGVSITENYLEIEGMANCLPFYGVADLKEILNAILNRNAKEVYECRPRKVISYLEGEAVRLSRQLPMYLSKEDIQDIIYRMKHQFGNEIKECVHGRPFFHHLTYLPETT

SEQ ID NO: 482 - protein, 337 aa, Homo sapiens
MRAVFIQGAEEHPAAFCYQVNGSCPRTVHTLGIQLVIYLTCAAGMLIIVLGNVFVAFAVSYFKALHTPTNFLLLSLALADMFLGLLVLPLSTIRSVESCWFFGDFLCRLHTYLDTLFCLTSIFHLCFISIDRHCAICDPLLYPSKFTVRVALRYILAGWGVPAAYTSLFLYTDVVETRLSQWLEEMPCVGSCQLLLNKFWGWLNFPLFFVPCLIMISLYVKIFVVATRQAQQITTLSKSLAGAAKHERKAAKTLGIVVGIYLLCWLPFTIDTMVDSLLHFITPPLVFDIFIWFAYFNSACNPIIYVFSYQWFRKALKLTLSQKVFSPQTRTVDLYQE

SEQ ID NO: 483 - protein, 338 aa, Homo sapiens
MMAMNSKQPFGMHPVLQEPKFSSLHSGSEAMRRVCLPAPQLQGNIFGSFDESLLARAEALAAVDIVSHGKNHPFKPDATYHTMSSVPCTSTSSTVPISHPAALTSHPHHAVHQGLEGDLLEHISPTLSVSGLGAPEHSVMPAQIHPHHLGAMGHLHQAMGMSHPHTVAPHSAMPACLSDVESDPRELEAFAERFKQRRIKLGVTQADVGAALANLKIPGVGSLSQSTICRFESLTLSHNNMIALKPVLQAWLEEAEAAYREKNSKPELFNGSERKRKRTSIAAPEKRSLEAYFAIQPRPSSEKIAAIAEKLDLKKNVVRVWFCNQRQKQKRMKYSAVH

SEQ ID NO: 484 - protein, 527 aa, Homo sapiens
MLLPLLLLLPMCWAVEVKRPRGVSLTNHHFYDESKPFTCLDGSATIPFDQVNDDYCDCKDGSDEPGTAACPNGSFHCTNTGYKPLYIPSNRVNDGVCDCCDGTDEYNSGVICENTCKEKGRKERESLQQMAEVTREGFRLKKILIEDWKKAREEKQKKLIELQAGKKSLEDQVEMLRTVKEEAEKPEREAKEQHQKLWEEQLAAAKAQQEQELAADAFKELDDDMDGTVSVTELQTHPELDTDGDGALSEAEAQALLSGDTQTDATSFYDRVWAAIRDKYRSEALPTDLPAPSAPDLTEPKEEQPPVPSSPTEEEEEEEEEEEEAEEEEEEEDSEEAPPPLSPPQPASPAEEDKMPPYDEQTQAFIDAAQEARNKFEEAERSLKDMEESIRNLEQEISFDFGPNGEFAYLYSQCYELTTNEYVYRLCPFKLVSQKPKLGGSPTSLGTWGSWIGPDHDKFSAMKYEQGTGCWQGPNRSTTVRLLCGKETMVTSTTEPSRCEYLMELMTPAACPEPPPEAPTEDDHDEL

SEQ ID NO: 485 - protein, 721 aa, Homo sapiens
MAEKFESLMNIHGFDLGSRYMDLKPLGCGGNGLVFSAVDNDCDKRVAIKKIVLTDPQSVKHALREIKIIRRLDHDNIVKVFEILGPSGSQLTDDVGSLTELNSVYIVQEYMETDLANVLEQGPLLEEHARLFMYQLLRGLKYIHSANVLHRDLKPANLFINTEDLVLKIGDFGLARIMDPHYSHKGHLSEGLVTKWYRSPRLLLSPNNYTKAIDMWAAGCIFAEMLTGKTLFAGAHELEQMQLILESIPVVHEEDRQELLSVIPVYIRNDMTEPHKPLTQLLPGISREALDFLEQILTFSPMDRLTAEEALSHPYMSIYSFPMDEPISSHPFHIEDEVDDILLMDETHSHIYNWERYHDCQFSEHDWPVHNNFDIDEVQLDPRALSDVTDEEEVQVDPRKYLDGDREKYLEDPAFDTNYSTEPCWQYSDHHENKYCDLECSHTCNYKTRSSSYLDNLVWRESEVNHYYEPKLIIDLSNWKEQSKEKSDKKGKSKCERNGLVKAQIALEEASQQLAGKEREKNQGFDFDSFIAGTIQLSSQHEPTDVVDKLNDLNSSVSQLELKSLISKSVSQEKQEKGMANLAQLEALYQSSWDSQFVSGGEDCFFINQFCEVRKDEQVEKENTYTSYLDKFFSRKEDTEMLETEPVEDGKLGERGHEEGFLNNSGEFLFNKQLESIGIPQFHSPVGSPLKSIQATLTPSAMKSSPQIPHQTYSSILKHLN

SEQ ID NO: 486 - protein, 248 aa, Homo sapiens
MSYDRAITVFSPDGHLFQVEYAQEAVKKGSTAVGVRGRDIVVLGVEKKSVAKLQDERTVRKICALDDNVCMAFAGLTADARIVINRARVECQSHRLTVEDPVTVEYITRYIASLKQRYTQSNGRRPFGISALIVGFDFDGTPRLYQTDPSGTYHAWKANAIGRGAKSVREFLEKNYTDEAIETDDLTIKLVIKALLEVVQSGGKNIELAVMRRDQSLKILNPEEIEKYVAEIEKEKEENEKKKQKKAS

SEQ ID NO: 487 - protein, 205 aa, Homo sapiens
MSIMSYNGGAVMAMKGKNCVAIAADRRFGIQAQLVTTDFQKIFPMGDRLYIGLAGLATDVQTVAQRLKFRLNLYELKEGRQIKPYTLMSMVANLLYEKRFGPYYTEPVIAGLDPKTFKPFICSLDLIGCPMVTDDFVVSGTCAEQMYGMCESLWEPNMDPDHLFETISQAMLNAVDRDAVSGMGVIVHIIEKDKITTRTLKARMD

SEQ ID NO: 488 - protein, 415 aa, Homo sapiens
MPTTIEREFEELDTQRRWQPLYLEIRNESHDYPHRVAKFPENRNRNRYRDVSPYDHSRVKLQNAENDYINASLVDIEEAQRSYILTQGPLPNTCCHFWLMVWQQKTKAVVMLNRIVEKESVKCAQYWPTDDQEMLFKETGFSVKLLSEDVKSYYTVHLLQLENINSGETRTISHFHYTTWPDFGVPESPASFLNFLFKVRESGSLNPDHGPAVIHCSAGIGRSGTFSLVDTCLVLMEKGDDINIKQVLLNMRKYRMGLIQTPDQLRFSYMAIIEGAKCIKGDSSIQKRWKELSKEDLSPAFDHSPNKIMTEKYNGNRIGLEEEKLTGDRCTGLSSKMQDTMEENSESALRKRIREDRKATTAQKVQQMKQRLNENERKRKRWLYWQPILTKMGFMSVILVGAFVGWRLFFQQNAL

SEQ ID NO: 489 - protein, 215 aa, Homo sapiens
MTSRSTARPNGQPQASKICQFKLVLLGESAVGKSSLVLRFVKGQFHEYQESTIGAAFLTQSVCLDDTTVKFEIWDTAGQERYHSLAPMYYRGAQAAIVVYDITNQETFARAKTWVKELQRQASPSIVIALAGNKADLANKRMVEYEEAQAYADDNSLLFMETSAKTAMNVNDLFLAIAKKLPKSEPQNLGGAAGRSRGVDLHEQSQQNKSQCCSN

SEQ ID NO: 490 - protein, 648 aa, Homo sapiens [sequence omitted]

SEQ ID NO: 491 - protein, 184 aa, Homo sapiens
MREYKLVVLGSGGVGKSALTVQFVQGIFVEKYDPTIEDSYRKQVEVDCQQCMLEILDTAGTEQFTAMRDLYMKNGQGFALVYSITAQSTFNDLQDLREQILRVKDTEDVPMILVGNKCDLEDERVVGKEQGQNLARQWCNCAFLESSAKSKINVNEIFYDLVRQINRKTPVEKKKPKKKSCLLL

SEQ ID NO: 492 - protein, 366 aa, Homo sapiens
MVKLFIGNLPREATEQEIRSLFEQYGKVLECDIIKNYGFVHIEDKTAAEDAIRNLHHYKLHGVNINVEASKNKSKTSTKLHVGNISPTCTNKELRAKFEEYGPVIECDIVKDYAFVHMERAEDAVEAIRGLDNTEFQGKRMHVQLSTSRLRTAPGMGDQSGCYRCGKEGHWSKECPIDRSGRVADLTEQYNEQYGAVRTPYTMSYGDSLYYNNAYGALDAYYKRCRAARSYEAVQLQLPPCIITQSRPCPSCHKSRIQPWPVTSPPPLSIPTIDTCCRPQELLPQLLLQQQPLLLLLQLPLHITGGIGAPCVALQPQSPLLERATVTGMRVSCPKLQQPRGILCTTWPGMSGSSMPIGRGTQPFKA

SEQ ID NO: 493 - protein, 211 aa, Homo sapiens
MQSAMFLAVQHDCRPMDKSAGSGHKSEEKREKMKRTLLKDWKTRLSYFLQNSSTPGKPKTGKKSKQQAFIKPSPEEAQLWSEAFDELLASKYGLAAFRAFLKSEFCEENIEFWLACEDFKKTKSPQKLSSKARKIYTDFIEKEAPKEINIDFQTKTLIAQNIQEATSGCFTTAQKRVYSLMENNSYPRFLESEFYQDLCKKPQITTEPHAT

SEQ ID NO: 494 - protein, 1657 aa, Homo sapiens
MSAADEVDGLGVARPHYGSVLDNERLTAEEMDERRRQNVAYEYLCHLEEAKRWMEACLGEDLPPTTELEEGLRNGVYLAKLGNFFSPKVVSLKKIYDREQTRYKATGLHFRHTDNVIQWLNAMDEIGLPKIFYPETTDIYDRKNMPRCIYCIHALSLYLFKLGLAPQIQDLYGKVDFTEEEINNMKTELEKYGIQMPAFSKIGGILANELSVDEAALHAAVIAINEAIDRRIPADTFAALKNPNAMLVNLEEPLASTYQDILYQAKQDKMTNAKNRTENSERERDVYEELLTQAEIQGNINKVNTFSALANIDLALEQGDALALFRALQSPALGLRGLQQQNSDWYLKQLLSDKQQKRQSGQTDPLQKEELQSGVDAANSAAQQYQRRLAAVALINAAIQKGVAEKTVLELMNPEAQLPQVYPFAADLYQKELATLQRQSPEHNLTHPELSVAVEMLSSVALINRALESGDVNTVWKQLSSSVTGLTNIEEENCQRYLDELMKLKAQAHAENNEFITWNDIQACVDHVNLVVQEEHERILAIGLINEALDEGDAQKTLQALQIPAAKLEGVLAEVAQHYQDTLIRAKREKAQEIQDESAVLWLDEIQGGIWQSNKDTQEAQKFALGIFAINEAVESGDVGKTLSALRSPDVGLYGVIPECGETYHSDLAEAKKKKLAVGDNNSKWVKHWVKGGYYYYHNLETQEGGWDEPPNFVQNSMQLSREEIQSSISGVTAAYNREQLWLANEGLITRLQARCRGYLVRQEFRSRMNFLKKQIPAITCIQSQWRGYKQKKAYQDRLAYLRSHKDEVVKIQSLARMHQARKRYRDRLQYFRDHINDIIKIQAFIRANKARDDYKTLINAEDPPMVVVRKFVHLLDQSDQDFQEELDLMKMREEVITLIRSNQQLENDLNLMDIKIGLLVKNKITLQDVVSHSKKLTKKNKEQLSDMMMINKQKGGLKALSKEKREKLEAYQHLFYLLQTNPTYLAKLIFQMPQNKSTKFMDSVIFTLYNYASNQREEYLLLRLFKTALQEEIKSKVDQIQEIVTGNPTVIKMVVSFNRGARGQNALRQILAPVVKEIMDDKSLNIKTDPVDIYKSWVNQMESQTGEASKLPYDVTPEQALAHEEVKTRLDSSIRNMRAVTDKFLSAIVSSVDKIPYGMRFIAKVLKDSLHEKFPDAGEDELLKIIGNLLYYRYMNPAIVAPDAFDIIDLSAGGQLTTDQRRNLGSIAKMLQHAASNKMFLGDNAHLSIINEYLSQSYQKFRRFFQTACDVPELQDKFNVDEYSDLVTLTKPVIYISIGEIINTHTLLLDHQDAIAPEHNDPIHELLDDLGEVPTIESLIGESSGNLNDPNKEALAKTEVSLTLTNKFDVPGDENAEMDARTILLNTKRLIVDVIRFQPGETLTEILETPATSEQEAEHQRAMQRRAIRDAKTPDKMKKSKSVKEDSNLTLQEKKEKIQTGLKKLTELGTVDPKNKYQELINDIARDIRNQRRYRQRRKAELVKLQQTYAALNSKATFYGEQVDYYKSYIKTCLDNLASKGKVSKKPREMKGKKSKKISLKYTAARLHEKGVLLEIEDLQVNQFKNVIFEISPTEEVGDFEVKAKFMGVQMETFMLHYQDLLQLQYEGVAVMKLFDRAKVNVNLLIFLLNKKFYGK

SEQ ID NO: 495 - protein, 1287 aa, Homo sapiens
MEPIYPFARPQMNTRFPSSRMVPFHFPPSKCALWNPTPTGDFIYLHLSYYRNPKLVVTEKTIRLAYRHANENKKNSSCFLLGSLTADEDEEGVTLTVDRFDPGREVPECLEITPTASLPGDFLIPCKVHTQELCSREMIVHSVDDFSSALKALQCHICSKDSLDCGKLLSLRVHITSRESLDSVEFDLHWAAVTLANNFKCTPVKPIPIIPTALARNLSSNLNISQVQGTYKYGYLTMDETRKLLLLLESDPKVYSLPLVGIWLSGITHIYSPQVWACCLRYIFNSSVQERVFSESGNFIIVLYSMTHKEPEFYECFPCDGKIPDFRFQLLTSKETLHLFKNVEPPDKNPIRCELSAESQNAETEFFSKASKNFSIKRSSQKLSSGKMPIHDHDSGVEDEDFSPRPIPSPHPVSQKISKIQPSVPELSLVLDGNFIESNPLPTPLEMVNNENPPLINHLEHLKPLQPQLYDEKHSPEVEAGEPSLRGIPNQLNQDKPALLRHCKVRQPPAYKKGNPHTRNSIKPSSHNGPSHDIFEKLQTVSAGNVQNEEYPIRPSTLNSRQSSLAPQSQPHDFVFSPHNSGRPMELQIPTPPLPSYCSTNVCRCCQHHSHIQYSPLNSWQGANTVGSIQDVQSEALQKHSLFHPSGCPALYCNAFCSSSSPIALRPQGDMGSCSPHSNIEPSPVARPPSHMDLCNPQPCTVCMHTPKTESDNGMMGLSPDAYRFLTEQDRQLRLLQAQIQRLLEAQSLMPCSPKTTAVEDTVQAGRQMELVSVEAQSSPGLHMRKGVSIAVSTGASLFWNAAGEDQEPDSQMKQDDTKISSEDMNFSVDINNEVTSLPGSASSLKAVDIPSFEESNIAVEEEFNQPLSVSNSSLVVRKEPDVPVFFPSGQLAESVSMCLQTGPTGGASNNSETSEEPKIEHVMQPLLHQPSDNQKIYQDLLGQVNHLLNSSSKETEQPSTKAVIISHECTRTQNVYHTKKKTHHSRLVDKDCVLNATLKQLRSLGVKIDSPTKVKKNAHNVDHASVLACISPEAVISGLNCMSFANVGMSGLSPNGVDLSMEANAIALKYLNENQLSQLSVTRSNQNNCDPFSLLHINTDRSTVGLSLISPNNMSFATKKYMKRYGLLQSSDNSEDEEEPPDNADSKSEYLLNQNLRSIPEQLGGQKEPSKNDHEIINCSNCESVGTNADTPVLRNITNEVLQTKAKQQLTEKPAFLVKNLKPSPAVNLRTGKAEFTQHPEKENEGDITIFPESLQPSETLKQMNSMNSVGTFLDVKRLRQLPKLF

SEQ ID NO: 496 - protein, 1212 aa, Homo sapiens
MEPRPTAPSSGAPGLAGVGETPSAAALAAARVELPGTAVPSVPEDAAPASRDGGGVRDEGPAAAGDGLGRPLGPTPSQSRFQVDLVSENAGRAAAAAAAAAAAAAAAGAGAGAKQTPADGEASGESEPAKGSEEAKGRFRVNFVDPAASSSAEDSLSDAAGVGVDGPNVSFQNGGDTVLSEGSSLHSGGGGGSGHHQHYYYDTHTNTYYLRTFGHNTMDAVPRIDHYRHTAAQLGEKLLRPSLAELHDELEKEPFEDGFANGEESTPTRDAVVTYTAESKGVVKFGWIKGVLVRCMLNIWGVMLFIRLSWIVGQAGIGLSVLVIMMATVVTTITGLSTSAIATNGFVRGGGAYYLISRSLGPEFGGAIGLIFAFANAVAVAMYVVGFAETVVELLKEHSILMIDEINDIRIIGAITVVILLGISVAGMEWEAKAQIVLLVILLLAIGDFVIGTFIPLESKKPKGFFGYKSEIFNENFGPDFREEETFFSVFAIFFPAATGILAGANISGDLADPQSAIPKGTLLAILITTLVYVGIAVSVGSCVVRDATGNVNDTIVTELTNCTSAACKLNFDFSSCESSPCSYGLMNNFQVMSMVSGFTPLISAGIFSATLSSALASLVSAPKIFQALCKDNIYPAFQMFAKGYGKNNEPLRGYILTFLIALGFILIAELNVIAPIISNFFLASYALINFSVFHASLAKSPGWRPAFKYYNMWISLLGAILCCIVMFVINWWAALLTYVIVLGLYIYVTYKKPDVNWGSSTQALTYLNALQHSIRLSGVEDHVKNFRPQCLVMTGAPNSRPALLHLVHDFTKNVGLMICGHVHMGPRRQAMKEMSIDQAKYQRWLIKNKMKAFYAPVHADDLREGAQYLMQAAGLGRMKPNTLVLGFKKDWLQADMRDVDMYINLFHDAFDIQYGVVVIRLKEGLDISHLQGQEELLSSQEKSPGTKDVVVSVEYSKKSDLDTSKPLSEKPITHKVEEEDGKTATQPLLKKESKGPIVPLNVADQKLLEASTQFQKKQGKNTIDVWWLFDDGGLTLLIPYLLTTKKKWKDCKIRVFIGGKINRIDHDRRAMATLLSKFRIDFSDIMVLGDINTKPKKENIIAFEEIIEPYRLHEDDKEQDIADKMKEDEPWRITDNELELYKTKTYRQIRLNELLKEHSSTANIIVMSLPVARKGAVSSALYMAWLEALSKDLPPILLVRGNHQSVLTFYS

SEQ ID NO: 497 - protein, 1030 aa, Homo sapiens
MAELPTTETPGDATLCSGRFTISTLLSSDEPSPPAAYDSSHPSHLTHSSTFCMRTFGYNTIDVVPTYEHYANSTQPGEPRKVRPTLADLHSFLKQEGRHLHALAFDSRPSHEMTDGLVEGEAGTSSEKNPEEPVRFGWVKGVMIRCMLNIWGVILYLRLPWITAQAGIVLTWIIILLSVTVTSITGLSISAISTNGKVKSGGTYFLISRSLGPELGGSIGLIFAFANAVGVAMHTVGFAETVRDLLQEYGAPIVDPINDIRIIGVVSVTVLLAISLAGMEWESKAQVLFFLVIMVSFANYLVGTLIPPSEDKASKGFFSYRADIFVQNLVPDWRGPDGTFFGMFSIFFPSATGILAGANISGDLKDPAIAIPKGTLMAIFWTTISYLAISATIGSCVVRDASGVLNDTVTPGWGACEGLACSYGWNFTECTQQHSCHYGLINYYQTMSMVSGFAPLITAGIFGATLSSALACLVSAAKVFQCLCEDQLYPLIGFFGKGYGKNKEPVRGYLLAYAIAVAFIIIAELNTIAPIISNFFLCSYALINFSCFHASITNSPGWRPSFQYYNKWAALFGAIISVVIMFLLTWWAALIAIGVVLFLLLYVIYKKPEVNWGSSVQAGSYNLALSYSVGLNEVEDHIKNYRPQCLVLTGPPNFRPALVDFVGTFTRNLSLMICGHVLIGPHKQRMPELQLIANGHTKWLNKRKIKAFYSDVIAEDLRRGVQILMQAAGLGRMKPNILVVGFKKNWQSAHPATVEDYIGILHDAFEFNYGVCVMRMREGLNVSKMMQAHINPVFDPAEDGKEASARGARPSVSGALDPKALVKEEQATTIFQSEQGKKTIDIYWLFDDGGLTLLIPYLLGRKRRWSKCKIRVFVGGQINRMDQERKAIISLLSKFRLGFHEVHILPDINQNPRAEHTKRFEDMIAPFRLNDGFKDEATVNEMRRDCPWKISDEEITKNRVKSLRQVRLNEIVLDYSRDAALIVITLPIGRKGKCPSSLYMAWLETLSQDLRPPVILIRGNQENVLTFYCQ

SEQ ID NO: 498 - protein, 314 aa, Homo sapiens
MAATASAGAGGMDGKPRTSPKSVKFLFGGLAGMGATVFVQPLDLVKNRMQLSGEGAKTREYKTSFHALTSILKAEGLRGIYTGLSAGLLRQATYTTTRLGIYTVLFERLTGADGTPPGFLLKAVIGMTAGATGAFVGTPAEVALIRMTADGRLPADQRRGYKNVFNALIRITREEGVLTLWRGCIPTMARAVVVNAAQLASYSQSKQFLLDSGYFSDNILCHFCASMISGLVTTAASMPVDIAKTRIQNMRMIDGKPEYKNGLDVLFKVVRYEGFFSLWKGFTPYYARLGPHTVLTFIFLEQMNKAYKRLFLSG

SEQ ID NO: 499 - protein, 678 aa, Homo sapiens
MAVKVQTTKRGDPHELRNIFLQYASTEVDGERYMTPEDFVQRYLGLYNDPNSNPKIVQLLAGVADQTKDGLISYQEFLAFESVLCAPDSMFIVAFQLFDKSGNGEVTFENVKEIFGQTIIHHHIPFNWDCEFIRLHFGHNRKKHLNYTEFTQFLQELQLEHARQAFALKDKSKSGMISGLDFSDIMVTIRSHMLTPFVEENLVSAAGGSISHQVSFSYFNAFNSLLNNMELVRKIYSTLAGTRKDVEVTKEEFAQSAIRYGQVTPLEIDILYQLADLYNASGRLTLADIERIAPLAEGALPYNLAELQRQQSPGLGRPIWLQIAESAYRFTLGSVAGAVGATAVYPIDLVKTRMQNQRGSGSVVGELMYKNSFDCFKKVLRYEGFFGLYRGLIPQLIGVAPEKAIKLTVNDFVRDKFTRRDGSVPLPAEVLAGGCAGGSQVIFTNPLEIVKIRLQVAGEITTGPRVSALNVLRDLGIFGLYKGAKACFLRDIPFSAIYFPVYAHCKLLLADENGHVGGLNLLAAGAMAGVPAASLVTPADVIKTRLQVAARAGQTTYSGVIDCFRKILREEGPSAFWKGTAARVFRSSPQFGVTLAHYEVLQRWFYIDFGGLKPAGSEPTPKSRIADLPPANPDHIGGYRLATATFAGIENKFGLYLPKFKSPSVAVVQPKAAVAATQ

SEQ ID NO: 500 - protein, 911 aa, Homo sapiens
MEELQDDYEDMMEENLEQEEYEDPDIPESQMEEPAAHDTEATATDYHTTSHPGTHKVYVELQELVMDEKNQELRWMEAARWVQLEENLGENGAWGRPHLSHLTFWSLLELRRVFTKGTVLLDLQETSLAGVANQLLDRFIFEDQIRPQDREELLRALLLKHSHAGELEALGGVKPAVLTRSGDPSQPLLPQHSSLETQLFCEQGDGGTEGHSPSGILEKIPPDSEATLVLVGRADFLEQPVLGFVRLQEAAELEAVELPVPIRFLFVLLGPEAPHIDYTQLGRAAATLMSERVFRIDAYMAQSRGELLHSLEGFLDCSLVLPPTDAPSEQALLSLVPVQRELLRRRYQSSPAKPDSSFYKGLDLNGGPDDPLQQTGQLFGGLVRDIRRRYPYYLSDITDAFSPQVLAAVIFIYFAALSPAITFGGLLGEKTRNQMGVSELLISTAVQGILFALLGAQPLLVVGFSGPLLVFEEAFFSFCETNGLEYIVGRVWIGFWLILLVVLVVAFEGSFLVRFISRYTQEIFSFLISLIFIYETFSKLIKIFQDHPLQKTYNYNVLMVPKPQGPLPNTALLSLVLMAGTFFFAMMLRKFKNSSYFPGKLRRVIGDFGVPISILIMVLVDFFIQDTYTQKLSVPDGFKVSNSSARGWVIHPLGLRSEFPIWMMFASALPALLVFILIFLESQITTLIVSKPERKMVKGSGFHLDLLLVVGMGGVAALFGMPWLSATTVRSVTHANALTVMGKASTPGAAAQIQEVKEQRISGLLVAVLVGLSILMEPILSRIPLAVLFGIFLYMGVTSLSGIQLFDRILLLFKPPKYHPDVPYVKRVKTWRMHLFTGIQIICLAVLWVVKSTPASLALPFVLILTVPLRRVLLPLIFRNVELQCLDADDAKATFDEEEGRDEYDEVAMPV

SEQ ID NO: 501 - protein, 261 aa, Homo sapiens
MEGGLGRAVCLLTGASRGFGRTLAPLLASLLSPGSVLVLSARNDEALRQLEAELGAERSGLRVVRVPADLGAEAGLQQLLGALRELPRPKGLQRLLLINNAGSLGDVSKGFVDLSDSTQVNNYWALNLTSMLCLTSSVLKAFPDSPGLNRTVVNISSLCALQPFKGWALYCAGKAARDMLFQVLALEEPNVRVLNYAPGPLDTDMQQLARETSVDPDMRKGLQELKAKGKLVDCKVSAQKLLSLLEKDEFKSGAHVDFYDK

SEQ ID NO: 502 - protein, 504 aa, Homo sapiens
MVLADLGRKITSALRSLSNATIINEEVLNAMLKEVCTALLEADVNIKLVKQLRENVKSAIDLEEMASGLNKRKMIQHAVFKELVKLVDPGVKAWTPTKGKQNVIMFVGLQGSGKTTTCSKLAYYYQRKGWKTCLICADTFRAGAFDQLKQNATKARIPFYGSYTEMDPVIIASEGVEKFKNENFEIIIVDTSGRHKQEDSLFEEMLQVANAIQPDNIVYVMDASIGQACEAQAKAFKDKVDVASVIVTKLDGHAKGGGALSAVAATKSPIIFIGTGEHIDDFEPFKTQPFISKLLGMGDIEGLIDKVNELKLDDNEALIEKLKHGQFTLRDMYEQFQNIMKMGPFSQILGMIPGFGTDFMSKGNEQESMARLKKLMTIMDSMNDQELDSTDGAKVFSKQPGRIQRVARGSGVSTRDVQELLTQYTKFAQMVKKMGGIKGLFKGGDMSKNVSQSQMAKLNQQMAKMMDPRVLHHMGGMAGLQSMMRQFQQGAAGNMKGMMGFNNM

SEQ ID NO: 503 - protein, 519 aa, Homo sapiens [sequence omitted]

SEQ ID NO: 504 - protein, 772 aa, Homo sapiens
MAAESALQVVEKLQARLAANPDPKKLLKYLKKLSTLPITVDILAETGVGKTVNSLRKHEHVGSFARDLVAQWKKLVPVERNAEPDEQDFEKSNSRKRPRDALQKEEEMEGDYQETWKATGSRSYSPDHRQKKHRKLSELERPHKVSHGHERRDERKRCHRMSPTYSSDPESSDYGHVQSPPSCTSPHQMYVDHYRSLEEDQEPIVSHQKPGKGHSNAFQDRLGASQERHLGEPHGKGVVSQNKEHKSSHKDKRPVDAKSDEKASVVSREKSHKALSKEENRRPPSGDNAREKPPSSGVKKEKDREGSSLKKKCLPPSEAASDNHLKKPKHRDPEKAKLDKSKQGLDSFDTGKGAGDLLPKVKEKGSNNLKTPEGKVKTNLDRKSLGSLPKVEETDMEDEFEQPTMSFESYLSYDQPRKKKKKIVKTSATALGDKGLKKNDSKSTGKNLDSVQKLPKVNKTKSEKPAGADLAKLRKVPDVLPVLPDLPLPAIQANYRPLPSLELISSFQPKRKAFSSPQEEEEAGFTGRRMNSKMQVYSGSKCAYLPKMMTLHQQCIRVLKNNIDSIFEVGGVPYSVLEPVLERCTPDQLYRIEEYNHVLIEETDQLWKVHCHRDFKEERPEEYESWREMYLRLQDAREQRLRVLTKNIQFAHANKPKGRQAKMAFVNSVAKPPRDVRRRQEKFGTGGAAVPEKIKIKPAPYPMGSSHASASSISFNPSPEEPAYDGPSTSSAHLAPVVSSTVSYDPRKPTVKKIAPMMAKTIKAFKNRFSRR

SEQ ID NO: 505 - protein, 246 aa, Homo sapiens
MAFLRSMWGVLSALGRSGAELCTGCGSRLRSPFSFVYLPRWFSSVLASCPKKPVSSYLRFSKEQLPIFKAQNPDAKTTELIRRIAQRWRELPDSKKKIYQDAYRAEWQVYKEEISRFKEQLTPSQIMSLEKEIMDKHLKRKAMTKKKELTLLGKPKRPRSAYNVYVAERFQEAKGDSPQEKLKTVKENWKNLSDSEKELYIQHAKEDETRYHNEMKSWEEQMIEVGRKDLLRRTIKKQRKYGAEEC

SEQ ID NO: 506 - protein, 246 aa, Homo sapiens; identical to SEQ ID NO: 505

SEQ ID NO: 507 - protein, 303 aa, Homo sapiens
MSDAGGGKKPPVDPQAGPGPGPGRAAGERGLSGSFPLVLKKLMENPPREARLDKEKGKEKLEEDEAAAASTMAVSASLMPPIWDKTIPYDGESFHLEYMDLDEFLLENGIPASPTHLAHNLLLPVAELEGKESASSSTASPPSSSTAIFQPSETVSSTESSLEKERETPSPIDPNCVEVDVNFNPDPADLVLSSVPGGELFNPRKHKFAEEDLKPQPMIKKAKKVFVPDEQKDEKYWTRRKKNNVAAKRSRDARRLKENQITIRAAFLEKENTALRTEVAELRKEVGKCKTIVSKYETKYGPL

SEQ ID NO: 508 - protein, 449 aa, Homo sapiens
MLWKLVENVKYEDIYEDRHDGVPSHSSRLSQLGSVSQGPYSSAPPLSHTPSSDFQPPYFPPPYQPLPYHQSQDPYSHVNDPYSLNPLHQPQQHPWGQRQRQEVGSEAGSLLPQPRAALPQLSGLDPRRDYHSVRRPDVLLHSAHHGLDAGMGDSLSLHGLGHPGMEDVQSVEDANNSGMNLLDQSVIKKVPVPPKSVTSLMMNKDGFLGGMSVNTGEVFCSVPGRLSLLSSTSKYKVTVGEVQRRLSPPECLNASLLGGVLRRAKSKNGGRSLRERLEKIGLNLPAGRRKAANVTLLTSLVEGEAVHLARDFGYICETEFPAKAVSEYLNRQHTDPSDLHSRKNMLLATKQLCKEFTDLLAQDRTPIGNSRPSPILEPGIQSCLTHFSLITHGFGAPAICAALTALQNYLTEALKGMDKMFLNNTTTNRHTSGEGPGSKTGDKEEKHRK

SEQ ID NO: 509 - protein, 254 aa, Homo sapiens
MEYASDASLDPEAPWPPAPRARACRVLPWALVAGLLLLLLLAAACAVFLACPWAVSGARASPGSAASPRLREGPELSPDDPAGLLDLRQGMFAQLVAQNVLLIDGPLSWYSDPGLAGVSLTGGLSYKEDTKELVVAKAGVYYVFFQLELRRVVAGEGSGSVSLALHLQPLRSAAGAAALALTVDLPPASSEARNSAFGFQGRLLHLSAGQRLGVHLHTEARARHAWQLTQGATVLGLFRVTPEIPAGLPSPRSE

SEQ ID NO: 510 - protein, 206 aa, Homo sapiens
MDSAGQDINLNSPNKGLLSDSMTDVPVDTGVAARTPAVEGLTEAEEEELRAELTKVEEEIVTLRQVLAAKEKHCGELKRRLGLSTLGELKQNLSRSWHDVQVSSAYVKTSEKLGEWNEKVTQSDLYKKTQETLSQAGQKTSAALSTVGSAISRKLGDMRNSATFKSFEDRVGTIKSKVVGDRENGSDNLPSSAGSGDKPLSDPAPF

SEQ ID NO: 511 - protein, 249 aa, Homo sapiens
MAPSRKFFVGGNWKMNGRKQSLGELIGTLNAAKVPADTEVVCAPPTAYIDFARQKLDPKIAVAAQNCYKVTNGAFTGEISPGMIKDCGATWVVLGHSERRHVFGESDELIGQKVAHALAEGLGVIACIGEKLDEREAGITEKVVFEQTKVIADNVKDWSKVVLAYEPVWAIGTGKTATPQQAQEVHEKLRGWLKSNVSDAVAQSTRIIYGGSVTGATCKELASQPDVDGFLVGGASLKPEFVDIINAKQ

SEQ ID NO: 512 - protein, 249 aa, Homo sapiens; identical to SEQ ID NO: 511

SEQ ID NO: 513 - protein, 370 aa, Homo sapiens
MVGKLKQNLLLACLVISSVTVFYLGQHAMECHHRIEERSQPVKLESTRTTVRTGLDLKANKTFAYHKDMPLIFIGGVPRSGTTLMRAMLDAHPDIRCGEETRVIPRILALKQMWSRSSKEKIRLDEAGVTDEVLDSAMQAFLLEIIVKHGEPAPYLCNKDPFALKSLTYLSRLFPNAKFLLMVRDGRASVHSMISRKVTIAGFDLNSYRDCLTKWNRAIETMYNQCMEVGYKKCMLVHYEQLVLHPERWMRTLLKFLQIPWNHSVLHHEEMIGKAGGVSLSKVERSTDQVIKPVNVGALSKWVGKIPPDVLQDMAVIAPMLAKLGYDPYANPPNYGKPDPKIIENTRRVYKGEFQLPDFLKEKPQTEQVE

SEQ ID NO: 514 - protein, 803 aa, Homo sapiens
MRALWVLGLCCVLLTFGSVRADDEVDVDGTVEEDLGKSREGSRTDDEVVQREEEAIQLDGLNASQIRELREKSEKFAFQAEVNRMMKLIINSLYKNKEIFLRELISNASDALDKIRLISLTDENALSGNEELTVKIKCDKEKNLLHVTDTGVGMTREELVKNLGTIAKSGTSEFLNKMTEAQEDGQSTSELIGQFGVGFYSAFLVADKVIVTSKHNNDTQHIWESDSNEFSVIADPRGNTLGRGTTITLVLKEEASDYLELDTIKNLVKKYSQFINFPIYVWSSKTETVEEPMEEEEAAKEEKEESDDEAAVEEEEEEKKPKTKKVEKTVWDWELMNDIKPIWQRPSKEVEEDEYKAFYKSFSKESDDPMAYIHFTAEGEVTFKSILFVPTSAPRGLFDEYGSKKSDYIKLYVRRVFITDDFHDMMPKYLNFVKGVVDSDDLPLNVSRETLQQHKLLKVIRKKLVRKTLDMIKKIADDKYNDTFWKEFGTNIKLGVIEDHSNRTRLAKLLRFQSSHHPTDITSLDQYVERMKEKQDKIYFMAGSSRKEAESSPFVERLLKKGYEVIYLTEPVDEYCIQALPEFDGKRFQNVAKEGVKFDESEKTKESREAVEKEFEPLLNWMKDKALKDKIEKAVVSQRLTESPCALVASQYGWSGNMERIMKAQAYQTGKDISTNYYASQKKTFEINPRHPLIRDMLRRIKEDEDDKTVLDLAVVLFETATLRSGYLLPDTKAYGDRIERMLRLSLNIDPDAKVEEEPEEEPEETAEDTTEDTEQDEDEEMDVGTDEEEETAKESTAEKDEL

SEQ ID NO: 515 - protein, 484 aa, Homo sapiens
MAATEPELLDDQEAKREAETFKEQGNAYYAKKDYNEAYNYYTKAIDMCPKNASYYGNRAATLMMLGRFREALGDAQQSVRLDDSFVRGHLREGKCHLSLGNAMAACRSFQRALELDHKNAQAQQEFKNANAVMEYEKIAETDFEKRDFRKVVFCMDRALEFAPACHRFKILKAECLAMLGRYPEAQSVASDILRMDSTNADALYVRGLCLYYEDCIEKAVQFFVQALRMAPDHEKACIACRNAKALKAKKEDGNKAFKEGNYKLAYELYTEALGIDPNNIKTNAKLYCNRGTVNSKLRKLDDAIEDCTNAVKLDDTYIKAYLRRAQCYMDTEQYEEAVRDYEKVYQTEKTKEHKQLLKNAQLELKKSKRKDYYKILGVDKNASEDEIKKAYRKRALMHHPDRHSGASAEVQKEEEKKFKEVGEAFTILSDPKKKTRYDSGQDLDEEGMNMGDFDPNNIFKAFFGGPGGFSFEASGPGNFFFQFG

SEQ ID NO: 516 - protein, 452 aa, Homo sapiens
MAAATLLRATPHFSGLAAGRTFLLQGLLRLLKAPALPLLCRGLAVEAKKTYVRDKPHVNVGTIGHVDHGKTTLTAAITKILAEGGGAKFKKYEEIDNAPEERARGITINAAHVEYSTAARHYAHTDCPGHADYVKNMITGTAPLDGCILVVAANDGPMPQTREHLLLARQIGVEHVVVYVNKADAVQDSEMVELVELEIRELLTEFGYKGEETPVIVGSALCALEGRDPELGLKSVQKLLDAVDTYIPVPARDLEKPFLLPVEAVYSVPGRGTVVTGTLERGILKKGDECELLGHSKNIRTVVTGIEMFHKSLERAEAGDNLGALVRGLKREDLRRGLVMVKPGSIKPHQKVEAQVYILSKEEGGRHKPFVSHFMPVMFSLTWNMACRIILPPEKELAMPGEDLKFNLILRQPMILEKGQRFTLRDGNRTIGTGLVTNTLAMTEEEKNIKWG

SEQ ID NO: 517 - protein, 183 aa, Homo sapiens
MSSPSPGKRRMDTDVVKLIESKHEVTILGGLNEFVVKFYGPQGTPYEGGVWKVRVDLPDKYPFKSPSIGFMNKIFHPNIDEASGTVCLDVINQTWTALYDLTNIFESFLPQLLAYPNPIDPLNGDAAAMYLHRPEEYKQKIKEYIQKYATEEALKEQEEGTGDSSSESSMSDFSEDEAQDMEL

SEQ ID NO: 518 - protein, 154 aa, Homo sapiens [sequence omitted]

SEQ ID NO: 519 - protein, 152 aa, Homo sapiens
MAGLPRRIIKETQRLLAEPVPGIKAEPDESNARYFHVVIAGPQDSPFEGGTFKLELFLPEEYPMAAPKVRFMTKIYHPNVDKLGRICLDILKDKWSPALQIRTVLLSIQALLSAPNPDDPLANDVAEQWKTNEAQAIETARAWTRLYAMNNI

SEQ ID NO: 520 - protein, 480 aa, Homo sapiens
MAASVVCRAATAGAQVLLRARRSPALLRTPALRSTATFAQALQFVPETQVSLLDNGLRVASEQSSQPTCTVGVWIDVGSRFETEKNNGAGYFLEHLAFKGTKNRPGSALEKEVESMGAHLNAYSTREHTAYYIKALSKDLPKAVELLGDIVQNCSLEDSQIEKERDVILREMQENDASMRDVVFNYLHATAFQGTPLAQAVEGPSENVRKLSRADLTEYLSTHYKAPRMVLAAAGGVEHQQLLDLAQKHLGGIPWTYAEDAVPTLTPCRFTGSEIRHRDDALPFAHVAIAVEGPGWASPDSVALQVANAIIGHYDCTYGGGVHLSSPLASGAVANKLCQSFQTFSICYAETGLLGAHFVCDRMKIDDMMFVLQGQWMRLCTSATESEVARGKNILRNALVSHLDGTTPVCEDIGRSLLTYGRRIPLAEWESRIAEVDASVVREICSKYIYDQCPAVAGYGPIEQLPDYNRIRSGMFWLRF

SEQ ID NO: 521 - protein, 453 aa, Homo sapiens
MKLLTRAGSFSRFYSLKVAPKVKATAAPAGAPPQPQDLEFTKLPNGLVIASLENYSPVSRIGLFIKAGSRYEDFSNLGTTHLLRLTSSLTTKGASSFKITRGIEAVGGKLSVTATRENMAYTVECLRGDVDILMEFLLNVTTAPEFRRWEVADLQPQLKIDKAVAFQNPQTHVIENLHAAAYQNALANPLYCPDYRIGKVTSEELHYFVQNHFTSARMALIGLGVSHPVLKQVAEQFLNMRGGLGLSGAKANYRGGEIREQNGDSLVHAAFVAESAVAGSAEANAFSVLQHVLGAGPHVKRGSNTTSHLHQAVAKATQQPFDVSAFNASYSDSGLFGIYTISQATAAGDVIKAAYNQVKRIAQGNLSNTDVQAAKNKLKAGYLMSVESSECFLEEVGSQALVAGSYMPPSTVLQQIDSVANADIINAAKKFVSGQKSMAASGNLGHTPFVDEL

SEQ ID NO: 522 - protein, 963 aa, Homo sapiens
MAEGGGCRERPDAETQKSELGPLMRTTLQRGAQWYLIDSRWFKQWKKYVGFDSWDMYNVGEHNLFPGPIDNSGLFSDPESQTLKEHLIDELDYVLVPTEAWNKLLNWYGCVEGQQPIVRKVVEHGLFVKHCKVEVYLLELKLCENSDPTNVLSCHFSKADTIATIEKEMRKLFNIPAERETRLWNKYMSNTYEQLSKLDNTVQDAGLYQGQVLVIEPQNEDGTWPRQTLQSKSSTAPSRNFTTSPKSSASPYSSVSASLIANGDSTSTCGMHSSGVSRGGSGFSASYNCQEPPSSHIQPGLCGLGNLGNTCFMNSALQCLSNTAPLTDYFLKDEYEAEINRDNPLGMKGEIAEAYAELIKQMWSGRDAHVAPSMFKTQVGRFAPQFSGYQQQDSQELLAFLLDGLHEDLNRVKKKPYLELKDANGRPDAVVAKEAWENHRLRNDSVIVDTFHGLFKSTLVCPECAKVSVTFDPFCYLTLPLPLKKDRVMEVFLVPADPHCRPTQYRVTVPLMGAVSDLCEALSRLSGIAAENMVVADVYNHRFHKIFQMDEGLNHIMPRDDIFVYEVCSTSVDGSECVTLPVYFRERKSRPSSTSSASALYGQPLLLSVPKHKLTLESLYQAVCDRISRYVKQPLPDEFGSSPLEPGACNGSRNSCEGEDEEEMEHQEEGKEQLSETEGSGEDEPGNDPSETTQKKIKGQPCPKRLFTFSLVNSYGTADINSLAADGKLLKLNSRSTLAMDWDRETRRLYYDEQESEAYEKHVSMLQPQKKKKTTVALRDCIELFTTMETLGEHDPWYCPNCKKHQQATKKFDLWSLPKILVVHLKRFSYNRYWRDKLDTVVEFPIRGLNMSEFVCNLSARPYVYDLIAVSNHYGAMGVGHYTAYAKNKLNGKWYYFDDSNVSLASEDQIVTKAAYVLFYQRRDDEFYKTPSLSSSGSSDGGTRPSSSQQGFGDDEACSMDTN

SEQ ID NO: 523 - protein, 1102 aa, Homo sapiens
MNHQQQQQQQKAGEQQLSEPEDMEMEAGDTDDPPRITQNPVINGNVALSDGHNTAEEDMEDDTSWRSEATFQFTVERFSRLSESVLSPPCFVRNLPWKIMVMPRFYPDRPHQKSVGFFLQCNAESDSTSWSCHAQAVLKIINYRDDEKSFSRRISHLFFHKENDWGFSNFMAWSEVTDPEKGFIDDDKVTFEVFVQADAPHGVAWDSKKHTGYVGLKNQGATCYMNSLLQTLFFTNQLRKAVYMMPTEGDDSSKSVPLALQRVFYELQHSDKPVGTKKLTKSFGWETLDSFMQHDVQELCRVLLDNVENKMKGTCVEGTIPKLFRGKMVSYIQCKEVDYRSDRREDYYDIQLSIKGKKNIFESFVDYVAVEQLDGDNKYDAGEHGLQEAEKGVKFLTLPPVLHLQLMRFMYDPQTDQNIKINDRFEFPEQLPLDEFLQKTDPKDPANYILHAVLVHSGDNHGGHYVVYLNPKGDGKWCKFDDDVVSRCTKEEAIEHNYGGHDDDLSVRHCTNAYMLVYIRESKLSEVLQAVTDHDIPQQLVERLQEEKRIEAQKRKERQEAHLYMQVQIVAEDQFCGHQGNDMYDEEKVKYTVFKVLKNSSLAEFVQSLSQTMGFPQDQIRLWPMQARSNGTKRPAMLDNEADGNKTMIELSDNENPWTIFLETVDPELAASGATLPKFDKDHDVMLFLKMYDPKTRSLNYCGHIYTPISCKIRDLLPVMCDRAGFIQDTSLILYEEVKPNLTERIQDYDVSLDKALDELMDGDIIVFQKDDPENDNSELPTAKEYFRDLYHRVDVIFCDKTIPNDPGFVVTLSNRMNYFQVAKTVAQRLNTDPMLLQFFKSQGYRDGPGNPLRHNYEGTLRDLLQFFKPRQPKKLYYQQLKMKITDFENRRSFKCIWLNSQFREEEITLYPDKHGCVRDLLEECKKAVELGEKASGKLRLLEIVSYKIIGVHQEDELLECLSPATSRTFRIEEIPLDQVDIDKENEMLVTVAHFHKEVFGTFGIPFLLRIHQGEHFREVMKRIQSLLDIQEKEFEKFKFAIVMTGRHQYINEDEYEVNLKDFEPQPGNMSHPRPWLGLDHFNKAPKRSRYTYLEKAIKIHN

SEQ ID NO: 524 - protein, 283 aa, Homo sapiens
MAVPPTYADLGKSARDVFTKGYGFGLIKLDLKTKSENGLEFTSSGSANTETTKVTGSLETKYRWTEYGLTFTEKWNTDNTLGTEITVEDQLARGLKLTFDSSFSPNTGKKNAKIKTGYKREHINLGCDMDFDIAGPSIRGALVLGYEGWLAGYQMNFETAKSRVTQSNFAVGYKTDEFQLHTNVNDGTEFGGSIYQKVNKKLETAVNLAWTAGNSNTRFGIAAKYQIDPDACFSAKVNNSSLIGLGYTQTLKPGIKLTLSALLDGKNVNAGGHKLGLGLEFQA

SEQ ID NO: 525 - protein, 559 aa, Homo sapiens
MPLVKRNIDPRHLCHTALPRGIKNELECVTNISLANIIRQLSSLSKYAEDIFGELFNEAHSFSFRVNSLQERVDRLSVSVTQLDPKEEELSLQDITMRKAFRSSTIQDQQLFDRKTLPIPLQETYDVCEQPPPLNILTPYRDDGKEGLKFYTNPSYFFDLWKEKMLQDTEDKRKEKRKQKQKNLDRPHEPEKVPRAPHDRRREWQKLAQGPELAEDDANLLHKHIEVANGPASHFETRPQTYVDHMDGSYSLSALPFSQMSELLTRAEERVLVRPHEPPPPPPMHGAGDAKPIPTCISSATGLIENRPQSPATGRTPVFVSPTPPPPPPPLPSALSTSSLRASMTSTPPPPVPPPPPPPATALQAPAVPPPPAPLQIAPGVLHPAPPPIAPPLVQPSPPVARAAPVCETVPVHPLPQGEVQGLPPPPPPPPLPPPGIRPSSPVTVTALAHPPSGLHPTPSTAPGPHVPLMPPSPPSQVIPASEPKRHPSTLPVISDARSVLLEAIRKGIQLRKVEEQREQEAKHERIENDVATILSRRIAVEYSDSEDDSEFDEVDWLE

SEQ ID NO: 526 - protein, 245 aa, Homo sapiens
MDKNELVQKAKLAEQAERYDDMAACMKSVTEQGAELSNEERNLLSVAYKNVVGARRSSWRVVSSIEQKTEGAEKKQQMAREYREKIETELRDICNDVLSLLEKFLIPNASQAESKVFYLKMKGDYYRYLAEVAAGDDKKGIVDQSQQAYQEAFEISKKEMQPTHPIRLGLALNFSVFYYEILNSPEKACSLAKTAFDEAIAELDTLSEESYKDSTLIMQLLRDNLTLWTSDTQGDEAEAGEGGEN

SEQ ID NO: 527 - protein, 630 aa, Homo sapiens
MSVSSGVQILTKPETVDRRRSAETTKEAGRPLEMAVSEPEASAAEWKQLDPAQSNLYNDVMLENYCNQASMGCQAPKPDMISKLEKGEAPWLGKGKRPSQGCPSKIARPKQKETDGKVQKDDDQLENIQKSQNKLLREVAVKKKTQAKKNGSDCGSLGKKNNLHKKHVPSKKRLLKFESCGKILKQNLDLPDHSRNCVKRKSDAAKEHKKSFNHSLSDTRKGKKQTGKKHEKLSSHSSSDKCNKTGKKHDKLCCHSSSHIKQDKIQTGEKHEKSPSLSSSTKHEKPQACVKPYECNQCGKVLSHKQGLIDHQRVHTGEKPYECNECGIAFSQKSHLVVHQRTHTGEKPYECIQCGKAHGHKHALTDHLRIHTGEKPYECAECGKTFRHSSNLIQHVRSHTGEKPYECKECGKSFRYNSSLTEHVRTHTGEIPYECNECGKAFKYSSSLTKHMRIHTGEKPFECNECGKAFSKKSHLIIHQRTHTKEKPYKCNECGKAFGHSSSLTYHMRTHTGESPFECNQCGKGFKQIEGLTQHQRVHTGEKPYECNECGKAFSQKSHLIVHQRTHTGEKPYECNECEKAFNAKSQLVIHQRSHTGEKPYECNECGKTFKQNASLTKHVKTHSEDKSHE

SEQ ID NO: 528 - protein, 589 aa, Homo sapiens
MCGPFLKDILHLAEHQGTQSEEKPYTCGACGRDFWLNANLHQHQKEHSGGKPFRWYKDRDALMKSSKVHLSENPFTCREGGKVILGSCDLLQLQAVDSGQKPYSNLGQLPEVCTTQKLFECSNCGKAFLKSSTLPNHLRTHSEEIPFTCPTGGNFLEEKSILGNKKFHTGEIPHVCKECGKAFSHSSKLRKHQKFHTEVKYYECIACGKTFNHKLTFVHHQRIHSGERPYECDECGKAFSNRSHLIRHEKVHTGERPFECLKCGRAFSQSSNFLRHQKVHTQVRPYECSQCGKSFSRSSALIQHWRVHTGERPYECSECGRAFNNNSNLAQHQKVHTGERPFECSECGRDFSQSSHLLRHQKVHTGERPFECCDCGKAFSNSSTLIQHQKVHTGQRPYECSECRKSFSRSSSLIQHWRIHTGEKPYECSECGKAFAHSSTLIEHWRVHTKERPYECNECGKFFSQNSILIKHQKVHTGEKPYKCSECGKFFSRKSSLICHWRVHTGERPYECSECGRAFSSNSHLVRHQRVHTQERPYECIQCGKAFSERSTLVRHQKVHTRERTYECSQCGKLFSHLCNLAQHKKIHT

SEQ ID NO: 529 - protein, 3394 aa, Homo sapiens
NCQTQRAISGQLGDIRKMPPAPSGPKASPMPVPTESSSQKTAVPPQVKLVKKQEQEVKTEAEKVILEKVKETLSMEKIPPMVTTDQKQEESKLEKDKASALQEKKPLPEEKKLIPEEEKIRSEEKKPLLEEKKPTPEDKKLLPEAKTSAPEEQKHDLLKSQVQIAEEKLEGRVAPKTVQEGKQPQTKMEGLPSGTPQSLPKEDDKTTKTIKEQPQPPCTAKPDQEKEDDKSDTSSSQQPKSPQGLSDTGYSSDGISSSLGEIPSLIPTDEKDILKGLKKDSFSQESSPSSPSDLAKLESTVLSILEAQASTLADEKSEKKTQPHEVSPEQPKDQEKTQSLSETLEITISEEEIKESQEERKDTFKKDSQQDIPSSKDHKEKSEFVDDITTRREPYDSVEESSESENSPVPQRKRRTSVGSSSSDEYKQEDSQGSGEEEDFIRKQIIEMSADEDASGSEDDEFIRNQLKEISSSTESQKKEETKGKGKITAGKHRRLTRKSSTSIDEDAGRRHSWHDEDDEAFDESPELKYRETKSQESEELVVTGGGGLRRFKTIELNSTIADKYSAESSQKKTSLYFDEEPELEMESLTDSPEDRSRGEGSSSLHASSFTPGTSPTSVSSLDEDSDSSPSHKKGESKQQRKARHRPHGPLLPTIEDSSEEEELREEEELLKEQEKQREIEQQQRKSSSKKSKKDKDELRAQRRRERPKTPPSNLSPIEDASPTEELRQAAEMEELHRSSCSEYSPSIESDPEGFEISPEKIIEVQKVYKLPTAVSLYSPTDEQSIMQKEGSQKALKSAEEMYEEMMHKTHKYKAFPAANERDEVFEKEPLYGGMLIEDYIYESLVEDTYNGSVDGSLLTRQEEENGFMQQKGREQKIRLSEQIYEDPMQKITDLQKEFYELESLHSVVPQEDIVSSSFIIPESHEIVDLGTMVTSTEEERKLLDADAAYEELMKRQQMQLTPGSSPTQAPIGEDMTESTMDFDRMPDASLTSSVLSGASLTDSTSSATLSIPDVKITQHFSTEEIEDEYVTDYTREIQEIIAHESLILTYSEPSESATSVPPSDTPSLTSSVSSVCTTDSSSPITTLDSITTVYTEPVDMITKFEDSEEISSSTYFPGSIIDYPEEISVSLDRTAPPDGRASADHIVISLSDMASSIIESVVPKPEGPVADTVSTDLLISEKDPVKKAKKETGNGIILEVLEAYRDKKELEAERTKSSLSETVFDHPPSSVIALPMKEQLSTTYFTSGETFGQEKPASQLPSGSPSVSSLPAKPRPFFRSSSLDISAQPPPPPPPPPPPPPPPPPPPPPPLPPPTSPKPTILPKKKLTVASPVTTATPLFDAVTTLETTAVLRSNGLPVTRICTTAPPPVPPKPSSIPSGLVFTHRPEPSKPPIAPKPVIPQLPTTTQKPTDIHPKPTGLSLTSSMTLNLVTSADYKLPSPTSPLSPHSNKSSPRFSKSLTETYVVITLPSEPGTPTDSSASQAITSWPLGSPSKDLVSVEPVFSVVPPVTAVEIPISSEQTFYISGALQTFSATPVTAPSSFQAAPTSVTQFLTTEVSKTEVSATRSTAPSVGLSSISITIPPEPLALDNIHLEKPQYKEDGKLQLVGDVIDLRTVPKVEVKTTDKCIDLSASTMDVKRQITANEVYGKQISAVQPSIINLSVTSSIVTPVSLATETVTFVTCTASASYTTGTESLVGAEHAMTTPLQLTTSKHAEPPYRIPSDQVFPIAREEAPINLSLGTPAHAVTLAITKPVTVPPVGVTNGWTDSTVSQGITDGEVVDLSTTKSHRTVVTMDESTSSVMTKIIEDEKPVDLTAGRRAVCCDVVYKLPFGRSCTAQQPATTLPEDRFGYRDDHYQYDRSGPYGYRGIGGMKPSMSDTNLAEAGHFFYKSKNAFDYSEGTDTAVDLTSGRVTTGEVMDYSSKTTGPYPETRQVISGAGISTPQYSTARMTPPPGPQYCVGSVLRSSNGVVYSSVATPTPSTFAITTQPGSIFSTTVRDLSGIHTADAVTSLPAMHHSQPMPRSYFITTGASETDIAVTGIDISASLQTITMESLTAETIDSVPTLTTASEVFPEVVGDESALLIVPEEDKQQQQLDLERELLELEKIKQQRFAEELEWERQEIQRFREQEKIMVQKKLEELQSMKQHLLFQQEEERQAQFMMRQETLAQQQLQLEQIQQLQQQLHQQLEEQKIRQIYQYNYDPSGTASPQTTTEQAILEGQYAALEGSQFWATEDATTTASAVVAIEIPQSQGWYTVQSDGVTQYIAPPGILSTVSEIPLTDVVVKEEKQPKKRSSGAKVRGQYDDMGENMTDDPRSFKKIVDSGVQTDDEDATDRSYVSRRRRTKKSVDTSVQTDDEDQDEWDMPTRSRRKARVGKYGDSMTEADKTKPLSKVSSIAVQTVAEISVQTEPVGTIRTPSIRARVDAKVEIIKHISAPEKTYKGGSLGCQTEADSDTQSPQYLSATSPPKDKKRPTPLEIGYSSHLRADSTVQLAPSPPKSPKVLYSPISPLSPGKALESAFVPYEKPLPDDISPQKVLHPDMAKVPPASPKTAKMMQRSMSDPKPLSPTADESSRAPFQYTEGYTTKGSQTMTSSGAQKKVKRTLPNPPPEEISTGTQSTFSTMGTVSRRRICRTNTMARAKILQDIDRELDLVERESAKLRKKQAELDEEEKEIDAKLRYLEMGINRRKEALLKEREKRERAYLQGVAEDRDYMSDSEVSSTRPTRIESQHGIERPRTAPQTEFSQFIPPQTQTESQLVPPTSPYTQYQYSSPALPTQAPTSYTQQSHFEQQTLYHQQVSPYQTQPTFQAVATMSFTPQVQPTPTPQPSYQLPSQMMVIQQKPRQTTLYLEPKITSNYEVIRNQPLMIAPVSTDNTFAVSHLGSKYNSLDLRIGLEERSSMASSPISSISADSFYADIDHHTPRNYVLIDDIGEITKGTAALSTAFSLHEKDLSKTDRLLRTTETRRSQEVTDFLAPLQSSSRLHSYVKAEEDPMEDPYELKLLKHQIKQEFRRGTESLDHLAGLSHYYHADTSYRHFPKSEKYSISRLTLEKQAAKQLPAAILYQKQSKHKKSLIDPKMSKFSPIQESRDLEPDYSSYMTSSTSSIGGISSRARLLQDDITFGLRKNITDQQKFMGSSLGTGLGTLGNTIRSALQDEADKPYSSGSRSRPSSRPSSVYGLDLSIKRDSSSSSLRLKAQEAEALDVSFSHASSSARTKPTSLPISQSRGRIPIVAQNSEEESPLSPVGQPMGMARAAAGPLPPISADTRDQFGSSHSLPEVQQHMREESRTRGYDRDIAFIMDDFQHAMSDSEAYHLRREETDWFDKPRESRLENGHGLDRKLPERLVHSRPLSQHQEQIIQMNGKTMHYIFPHARIKITRDSKDHTVS

SEQ ID NO: 530 - protein, 459 aa, Homo sapiens
MASGVEVLRFQLPGHEAATLRNMNQLRAEERFCDVTIVADSLKFRGHKVILAACSPFLRDQFLLNPSSELQVSLMHSARIVADLLLSCYTGALEFAVRDIVNYLTAASYLQMEHVVEKCRNALSQFIEPKIGLKEDGVSEASLVSSISATKSLLPPARTPKPAPKPPPPPPLPPPLLRPVKLEFPLDEDLELKAEEEDEDEDEDVSDICIVKVESALEVAHRLKPPGGLGGGLGIGGSVGGHLGELAQSSVPPSTVAPPQGVVKACYSLSEDAEGEGLLLIPGGRASVGATSGLVEAAAVAMAARGAGGSLGAGGSRGPLPGGFSGGNPLKNIKCTKCPEVFQGVEKLVFHMRAQHFIFMCPRCGKQFNHSSNLNRHMNVHRGVKSHSCGICGKCFTQKSTLHDHLNLHSGARPYRCSYCDVRFAHKPAIRRHLKEQHGKTTAENVLEASVAEINVLIR

SEQ ID NO: 531 - protein, 334 aa, Homo sapiens
MATLKEKLIAPVAEEEATVPNNKITVVGVGQVGMACAISILGKSLADELALVDVLEDKLKGEMMDLQHGSLFLQTPKIVADKDYSVTANSKIVVVTAGVRQQEGESRLNLVQRNVNVFKFIIPQIVKYSPDCIIIVVSNPVDILTYVTWKLSGLPKHRVIGSGCNLDSARFRYLMAEKLGIHPSSCHGWILGEHGDSSVAVWSGVNVAGVSLQELNPEMGTDNDSENWKEVHKMVVESAYEVIKLKGYTNWAIGLSVADLIESMLKNLSRIHPVSTMVKGMYGIENEVFLSLPCILNARGLTSVINQKLKDDEVAQLKKSADTLWDIQKDLKDL

SEQ ID NO: 532 - protein, 114 aa, Homo sapiens
MNVLLGSVVIFATFVTLCNASCYFIPNEGVPGDSTRKCMDLKGNKHPINSEWQTDNCETCTCYETEISCCTLVSTPVGYDKDNCQRIFKKEDCKYIVVEKKDPKKTCSVSEWII

SEQ ID NO: 533 - protein, 539 aa, Homo sapiens
MAAALRVAAVGARLSVLASGLRAAVRSLCSQATSVNERIENKRRTALLGGGQRRIDAQHKRGKLTARERISLLLDPGSFVESDMFVEHRCADFGMAADKNKFPGDSVVTGRGRINGRLVYVFSQDFTVFGGSLSGAHAQKICKIMDQAITVGAPVIGLNDSGGARIQEGVESLAGYADIFLRNVTASGVIPQISLIMGPCAGGAVYSPALTDFTFMVKDTSYLFITGPDVVKSVTNEDVTQEELGGAKTHTTMSGVAHRAFENDVDALCNLRDFFNYLPLSSQDPASVRECHDPSDRLVPELDTIVPLESTKAYNMVDIIHSVVDEREFFEIMPNYAKNIIVGFARMNGRTVGIVGNQPKVASGCLDINSSVKGARFVRFCDAFNIPLITFVDVPGFLPGTAQEYGGIIRHGAKLLYAFAEATVPKVTVITRKAYGGAYDVMSSKHLCGDTNYAWPTAEIAVMGAKGAVEIIFKGHENVEAAQAEYIEKFANPFPAAVRGFVDDIIQPSSTRARICCDLDVLASKKVQRPWRKHANIPL

SEQ ID NO: 534 - protein, 655 aa, Homo sapiens
MQAARMAASLGRQLLRLGGGSSRLTALLGQPRPGPARRPYAGGAAQLALDKSDSHPSDALTRKKPAKAESKSFAVGMFKGQLTTDQVFPYPSVLNEEQTQFLKELVEPVSRFFEEVNDPAKNDALEMVEETTWQGLKELGAFGLQVPSELGGVGLCNTQYARLVEIVGMHDLGVGITLGAHQSIGFKGILLFGTKAQKEKYLPKLASGETVAAFCLTEPSSGSDAASIRTSAVPSPCGKYYTLNGSKLWISNGGLADIFTVFAKTPVTDPATGAVKEKITAFVVERGFGGITHGPPEKKMGIKASNTAEVFFDGVRVPSENVLGEVGSGFKVAMHILNNGRFGMAAALAGTMRGIIAKAVDHATNRTQFGEKIHNFGLIQEKLARMVMLQYVTESMAYMVSANMDQGATDFQIEAAISKIFGSEAAWKVTDECIQIMGGMGFMKEPGVERVLRDLRIFRIFEGTNDILRLFVALQGCMDKGKELSGLGSALKNPFGNAGLLLGEAGKQLRRRAGLGSGLSLSGLVHPELSRSGELAVRALEQFATVVEAKLIKHKKGIVNEQFLLQRLADGAIDLYAMVVVLSRASRSLSEGHPTAQHEKMLCDTWCIEAAARIREGMAALQSDPWQQELYRNFKSISKALVERGGVVTSNPLGF

SEQ ID NO: 535 - protein, 99 aa, Homo sapiens
MSTAQSLKSVDYEVFGRVQGVCFRMYTEDEARKIGVVGWVKNTSKGTVTGQVQGPEDKVNSMKSWLSKVGSPSSRIDRTNFSNEKTISKLEYSNFSIRY

SEQ ID NO: 536 - protein, 477 aa, Homo sapiens
MGAGVLVLGASEPGNLSSAAPLPDGAATAARLLVPASPPASLLPPASESPEPLSQQWTAGMGLLMALIVLLIVAGNVLVIVAIAKTPRLQTLTNLFIMSLASADLVMGLLVVPFGATIVVWGRWEYGSFFCELWTSVDVLCVTASIETLCVIALDRYLAITSPFRYQSLLTRARARGLVCTVWAISALVSFLPILMHWWRAESDEARRCYNDPKCCDFVTNRAYAIASSVVSFYVPLCIMAFVYLRVFREAQKQVKKIDSCERRFLGGPARPPSPSPSPVPAPAPPPGPPRPAAAAATAPLANGRAGKRRPSRLVALREQKALKTLGIIMGVFTLCWLPFFLANVVKAFHRELVPDRLFVFFNWLGYANSAFNPIIYCRSPDFRKAFQGLLCCARRAARRRHATHGDRPRASGCLARPGPPPSPGAASDDDDDDVVGATPPARLLEPWAGCNGGAAADSDSSLDEPCRPGFASESKV

SEQ ID NO: 537 - protein, 364 aa, Homo sapiens
MPYQYPALTPEQKKELSDIAHRIVAPGKGILAADESTGSIAKRLQSIGTENTEENRRFYRQLLLTADDRVNPCIGGVILFHETLYQKADDGRPFPQVIKSKGGVVGIKVDKGVVPLAGTNGETTTQGLDGLSERCAQYKKDGADFAKWRCVLKIGEHTPSALAIMENANVLARYASICQQNGIVPIVEPEILPDGDHDLKRCQYVTEKVLAAVYKALSDHHIYLEGTLLKPNMVTPGHACTQKFSHEEIAMATVTALRRTVPPAVTGITFLSGGQSEEEASINLNAINKCPLLKPWALTFSYGRALQASALKAWGGKKENLKAAQEEYVKRALANSLACQGKYTPSGQAGAAASESLFVSNHAY

SEQ ID NO: 538 - protein, 747 aa, Homo sapiens
MPLFKLPAEEKQIDDAMRNFAEKVFASEVKDEGGRQEISPFDVDEICPISHHEMQAHIFHLETLSTSTEARRKKRFQGRKTVNLSIPLSETSSTKLSHIDEYISSSPTYQTVPDFQRVQITGDYASGVTVEDFEIVCKGLYRALCIREKYMQKSFQRFPKTPSKYLRNIDGEAWVANESFYPVFTPPVKKGEDPFRTDNLPENLGYHLKMKDGVVYVYPNEAAVSKDEPKPLPYPNLDTFLDDMNFLLALIAQGPVKTYTHRRLKFLSSKFQVHQMLNEMDELKELKNNPHRDFYNCRKVDTHIHAAACMNQKHLLRFIKKSYQIDADRVVYSTKEKNLTLKELFAKLKMHPYDLTVDSLDVHAGRQTFQRFDKFNDKYNPVGASELRDLYLKTDNYINGEYFATIIKEVGADLVEAKYQHAEPRLSIYGRSPDEWSKLSSWFVCNRIHCPNMTWMIQVPRIYDVFRSKNFLPHFGKMLENIFMPVFEATINPQADPELSVFLKHITGFDSVDDESKHSGHMFSSKSPKPQEWTLEKNPSYTYYAYYMYANIMVLNSLRKERGMNTFLFRPHCGEAGALTHLMTAFMIADDISHGLNLKKSPVLQYLFFLAQIPIAMSPLSNNSLFLEYAKNPFLDFLQKGLMISLSTDDPMQFHFTKEPLMEEYAIAAQVFKLSTCDMCEVARNSVLQCGISHEEKVKFLGDNYLEEGPAGNDIRRTNVAQIRMAYRYETWCYELNLIAEGLKSTE

SEQ ID NO: 539 - protein, 505 aa, Homo sapiens
MSYPGYPPPPGGYPPAAPGGGPWGGAAYPPPPSMPPIGLDNVATYAGQFNQDYLSGMAANMSGTFGGANMPNLYPGAPGAGYPPVPPGGFGQPPSAQQPVPPYGMYPPPGGNPPSRMPSYPPYPGAPVPGQPMPPPGQQPPGAYPGQPPVTYPGQPPVPLPGQQQPVPSYPGYPGSGTVTPAVPPTQFGSRGTITDAPGFDPLRDAEVLRKAMKGFGTDEQAIIDCLGSRSNKQRQQILLSFKTAYGKDLIKDLKSELSGNFEKTILALMKTPVLFDIYEIKEAIKGVGTDEACLIEILASRSNEHIRELNRAYKAEFKKTLEEAIRSDTSGHFQRLLISLSQGNRDESTNVDMSLAQRDAQELYAAGENRLGTDESKFNAVLCSRSRAHLVAVFNEYQRMTGRDIEKSICREMSGDLEEGMLAVVKCLKNTPAFFAERLNKAMRGAGTKDRTLIRIMVSRSETDLLDIRSEYKRMYGKSLYHDISGDTSGDYRKILLKICGGND

SEQ ID NO: 540 - protein, 1417 aa, Homo sapiens
MAAVPQNNLQEQLERHSARTLNNKLSLSKPKFSGFTFKKKTSSDNNVSVTNVSVAKTPVLRNKDVNVTEDFSFSEPLPNTTNQQRVKDFFKNAPAGQETQRGGSKSLLPDFLQTPKEVVCTTQNTPTVKKSRDTALKKLEFSSSPDSLSTINDWDDMDDFDTSETSKSFVTPPQSHFVRVSTAQKSKKGKRNFFKAQLYTTNTVKTDLPPPSSESEQIDLTEEQKDDSEWLSSDVICIDDGPIAEVHINEDAQESDSLKTHLEDERDNSEKKKNLEEAELHSTEKVPCIEFDDDDYDTDFVPPSPEEIISASSSSSKCLSTLKDLDTSDRKEDVLSTSKDLLSKPEKMSMQELNPETSTDCDARQISLQQQLIHVMEHICKLIDTIPDDKLKLLDCGNELLQQRNIRRKLLTEVDFNKSDASLLGSLWRYRPDSLDGPMEGDSCPTGNSMKELNFSHLPSNSVSPGDCLLTTTLGKTGFSATRKNLFERPLFNTHLQKSFVSSNWAETPRLGKKNESSYFPGNVLTSTAVKDQNKHTASINDLERETQPSYDIDNFDIDDFDDDDDWEDIMHNLAASKSSTAAYQPIKEGRPIKSVSERLSSAKTDCLPVSSTAQNINFSESIQNYTDKSAQNLASRNLKHERFQSLSFPHTKEMMKIFHKKFGLHNFRTNQLEAINAALLGEDCFILMPTGGGKSLCYQLPACVSPGVTVVISPLRSLIVDQVQKLTSLDIPATYLTGDKTDSEATNIYLQLSKKDPIIKLLYVTPEKICASNRLISTLENLYERKLLARFVIDEAHCVSQWGHDFRQDYKRMNMLRQKFPSVPVMALTATANPRVQKDILTQLKILRPQVFSMSFNRHNLKYYVLPKKPKKVAFDCLEWIRKHHPYDSGIIYCLSRRECDTMADTLQRDGLAALAYHAGLSDSARDEVQQKWINQDGCQVICATIAFGMGIDKPDVRFVIHASLPKSVEGYYQESGRAGRDGEISHCLLFYTYHDVTRLKRLIMMEKDGNHHTRETHFNNLYSMVHYCENITECRRIQLLAYFGENGFNPDFCKKHPDVSCDNCCKTKDYKTRDVTDDVKSIVRFVQEHSSSQGMRNIKHVGPSGRFTMNMLVDIFLGSKSAKIQSGIFGKGSAYSRHNAERLFKKLILDKILDEDLYINANDQAIAYVMLGNKAQTVLNGNLKVDFMETENSSSVKKQKALVAKVSQREEMVKKCLGELTEVCKSLGKVFGVHYFNIFNTVTLKKLAESLSSDPEVLLQIDGVTEDKLEKYGAEVISVLQKYSEWTSPAEDSSPGISLSSSRGPGRSAAEELDEEIPVSSHYFASKTRNERKRKKMPASQRSKRRKTASSGSKAKGGSATCRKISSKTKSSSIIGSSSASHTSQATSGANSKLGIMAPPKPINRPFLKPSYAFS

SEQ ID NO: 541 - protein, 301 aa, Homo sapiens
MADQPKPISPLKNLLAGGFGGVCLVFVGHPLDTVKVRLQTQPPSLPGQPPMYSGTFDCFRKTLFREGITGLYRGMAAPIIGVTPMFAVCFFGFGLGKKLQQKHPEDVLSYPQLFAAGMLSGVFTTGIMTPGERIKCLLQIQASSGESKYTGTLDCAKKLYQEFGIRGIYKGTVLTLMRDVPASGMYFMTYEWLKNIFTPEGKRVSELSAPRILVAGGIAGIFNWAVAIPPDVLKSRFQTAPPGKYPNGFRDVLRELIRDEGVTSLYKGFNAVMIRAFPANAACFLGFEVAMKFLNWATPNL

SEQ ID NO: 542 - protein, 301 aa, Homo sapiens; identical to SEQ ID NO: 541

SEQ ID NO: 543 - protein, 399 aa, Homo sapiens
MKRTHLFIVGIYFLSSCRAEEGLNFPTYDGKDRVVSLSEKNFKQVLKKYDLLCLYYHEPVSSDKVTPKQFQLKEIVLELVAQVLEHKAIGFVMVDAKKEAKLAKKLGFDEEGSLYILKGDRTIEFDGEFAADVLVEFLLDLIEDPVEIISSKLEVQAFERIEDYIKLIGFFKSEDSEYYKAFEEAAEHFQPYIKFFATFDKGVAKKLSLKMNEVDFYEPFMDEPIAIPNKPYTEEELVEFVKEHQRPTLRRLRPEEMFETWEDDLNGIHIVAFAEKSDPDGYEFLEILKQVARDNTDNPDLSILWIDPDDFPLLVAYWEKTFKIDLFRPQIGVVNVTDADSVWMEIPDDDDLPTAEELEDWIEDVLSGKINTEDDDEDDDDDDNSDEEDNDDSDDDDDE

SEQ ID NO: 544 - protein, 305 aa, Homo sapiens
MDMFQKVEKIGEGTYGVVYKAKNRETGQLVALKKIRLDLEMEGVPSTAIREISLLKELKHPNIVRLLDVVHNERKLYLVFEFLSQDLKKYMDSTPGSELPLHLIKSYLFQLLQGVSFCHSHRVIHRDLKPQNLLINELGAIKLADFGLARAFGVPLRTYTHEVVTLWYRAPEILLGSKFYTTAVDIWSIGCIFAEMVTRKALFPGDSEIDQLFRIFRMLGTPSEDTWPGVTQLPDYKGSFPKWTRKGLEEIVPNLEPEGRDLLMQLLQYDPSQRITAKTALAHPYFSSPEPSPAARQYVLQRFRH

SEQ ID NO: 545 - protein, 1944 aa, Homo sapiens
MKAADTVILWARSKNDQLRISFPPGLCWGDRMPDKDDIRLLPSALGVKKRKRGPKKQKENKPGKPRKRKKRDSEEEFGSERDEYREKSESGGSEYGTGPGRKRRRKHREKKEKKTKRRKKGEGDGGQKQVEQKSSATLLLTWGLEDVEHVFSEEDYHTLTNYKAFSQFMRPLIAKKNPKIPMSKMMTILGAKWREFSANNPFKGSAAAVAAAAAAAAAAVAEQVSAAVSSATPIAPSGPPALPPPPAADIQPPPIRRAKTKEGKGPGHKRRSKSPRVPDGRKKLRGKKMAPLKIKLGLLGGKRKKGGSYVFQSDEGPEPEAEESDLDSGSVHSASGRPDGPVRTKKLKRGRPGRKKKKVLGCPAVAGEEEVDGYETDHQDYCEVCQQGGEIILCDTCPRAYHLVCLDPELDRAPEGKWSCPHCEKEGVQWEAKEEEEEYEEEGEEEGEKEEEDDHMEYCRVCKDGGELLCCDACISSYHIHCLNPPLPDIPNGEWLCPRCTCPVLKGRVQKILHWRWGEPPVAVPAPQQADGNPDVPPPRPLQGRSEREFFVKWVGLSYWHCSWAKELQLEIFHLVMYRNYQRKNDMDEPPPLDYGSGEDDGKSDKRKVKDPHYAEMEEKYYRFGIKPEWMTVHRIINHSVDKKGNYHYLVKWRDLPYDQSTWEEDEMNIPEYEEHKQSYWRHRELIMGEDPAQPRKYKKKKKELQGDGPPSSPTNDPTVKYETQPRFITATGGTLHMYQLEGLNWLRFSWAQGTDTILADEMGLGKTIQTIVFLYSLYKEGHTKGPFLVSAPLSTIINWEREFQMWAPKFYVVTYTGDKDSRAIIRENEFSFEDNAIKGGKKAFKMKREAQVKFHVLLTSYELITIDQAALGSIRWACLVVDEAHRLKNNQSKFFRVLNGYKIDHKLLLTGTPLQNNLEELFHLLNFLTPERFNNLEGFLEEFADISKEDQIKKLHDLLGPHMLRRLKADVFKNMPAKTELIVRVELSPMQKKYYKYILTRNFEALNSRGGGNQVSLLNIMMDLKKCCNHPYLFPVAAMESPKLPSGAYEGGALIKSSGKLMLLQKMLRKLKEQGHRVLIFSQMTKMLDLLEDFLDYEGYKYERIDGGITGALRQEAIDRFNAPGAQQFCFLLSTRAGGLGINLATADTVIIFDSDWNPHNDIQAFSRAHRIGQANKVMIYRFVTRASVEERITQVAKRKMMLTHLVVRPGLGSKAGSMSKQELDDILKFGTEELFKDENEGENKEEDSSVIHYDNEAIARLLDRNQDATEDTDVQNMNEYLSSFKVAQYVVREEDKIEEIEREIIKQEENVDPDYWEKLLRHHYEQQQEDLARNLGKGKRVRKQVNYNDAAQEDQDNQSEYSVGSEEEDEDFDERPEGRRQSKRQLRNEKDKPLPPLLARVGGNIEVLGFNTRQRKAFLNAVMRWGMPPQDAFTTQWLVRDLRGKTEKEFKAYVSLFMRHLCEPGADGSETFADGVPREGLSRQQVLTRIGVMSLVKKKVQEFEHINGRWSMPELMPDPSADSKRSSRASSPTKTSPTTPEASATNSPCTSKPATPAPSEKGEGIRTPLEKEEAENQEEKPEKNSRIGEKMETEADAPSPAPSLGERLEPRKIPLEDEVPGVPGEMEPEPGYRGDREKSEDVKGDRELRPGPRDEPRSNGRREEKTEKPRFMFNIADGGFTELHTLWQNEERAAISSGKLNEIWHRRHDYWLLAGIVLHGYARWQDIQNDAQFAIINEPFKTEANKGNFLEMKNKFLARRFKLLEQALVIEEQLRRAAYLNLSQEPAHPAMALHARFAEAECLAESHQHLSKESLAGNKPANAVLHKVLNQLEELLSDMKADVTRLPATLSRIPPIAARLQMSERSILSRLASKGTEPHPTPAYPPGPYATPPGYGAAFSAAPVGALAAAGANYSQMPAGSFITAATNGPIHRFFKKVPEIQ

SEQ ID NO: 546 - protein, 1493 aa, Homo sapiens
MPNEGIPHSSQTQEQDCLQSQPVSNNEEMAIKQESGGDGEVEEYLSFRSVGDGLSTSAVGCASAAPRRGPALLHIDRHQIQAVEPSAQALELQGLGVDVYDQDVLEQGVLQQVDNAIHEASRASQLVDVEKEYRSVLDDLTSCTTSLRQINKIIEQLSPQAATSRDINRKLDSVKRQKYNKEQQLKKITAKQKHLQAILGGAEVKIELDHASLEEDAEPGPSSLGSMLMPVQETAWEELIRTGQMTPFGTQIPQKQEKKPRKIMLNEASGFEKYLADQAKLSFERKKQGCNKRAARKAPAPVTPPAPVQNKNKPNKKARVLSKKEERLKKHIKKLQKRALQFQGKVGLPKARRPWESDMRPEAEGDSEGEESEYFPTEEEEEEEDDEVEGAEADLSGDGTDYELKPLPKGGKRQKKVPVQEIDDDFFPSSGEEAEAASVGEGGGGGRKVGRYRDDGDEDYYKQRLRRWNKLRLQDKEKRLKLEDDSEESDAEFDEGFKVPGFLFKKLFKYQQTGVRWLWELHCQQAGGILGDEMGLGKTIQIIAFLAGLSYSKIRTRGSNYRFEGLGPTVIVCPTTVMHQWVKEFHTWWPPFRVAILHETGSYTHKKEKLIRDVAHCHGILITSYSYIRLMQDDISRYDWHYVILDEGHKIRNPNAAVTLACKQFRTPHRIILSGSPMQNNLRELWSLFDFIFPGKLGTLPVFMEQFSVPITMGGYSNASPVQVKTAYKCACVLRDTINPYLLRRMKSDVKMSLSLPDKNEQVLFCRLTDEQHKVYQNFVDSKEVYRILNGEMQIFSGLIALRKICNHPDLFSGGPKNLKGLPDDELEEDQFGYWKRSGKMIVVESLLKIWHKQGQRVLLFSQSRQMLDILEVFLRAQKYTYLKMDGTTTIASRQPLITRYNEDTSIFVFLLTTRVGGLGVNLTGANRVVIYDPDWNPSTDTQARERAWRIGQKKQVTVYRLLTAGTIEEKIYHRQIFKQFLTNRVLKDPKQRRFFKSNDLYELFTLTSPDASQSTETSAIFAGTGSDVQTPKCHLKRRIQPAFGADHDVPKRKKFPASNISVNDATSSEEKSEAKGAEVNAVTSNRSDPLKDDPHMSSNVTSNDRLGEETNAVSGPEELSVISGNGECSNSSGTGKTSMPSGDESIDEKLGLSYKRERPSQAQTEAFWENKQMENNFYKHKSKTKHHSVAEEETLEKHLRPKQKPKNSKHCRDAKFEGTRIPHLVKKRRYQKQDSENKSEAKEQSNDDYVLEKLFKKSVGVHSVMKHDAIMDGASPDYVLVEAEANRVAQDALKALRLSRQRCLGAVSGVPTWTGHRGISGAPAGKKSRFGKKRNSNFSVQHPSSTSPTEKCQDGIMKKEGKDNVPEHFSGRAEDADSSSGPLASSSLLAKMRARNHLILPERLESESGHLQEASALLPTTEHDDLLVEMRNFIAFQAHTDGQASTREILQEFESKLSASQSCVFRELLRNLCTFHRTSGGEGIWKLKPEYC

SEQ ID NO: 547 - protein, 132 aa, Homo sapiens
MCDAFVGTWKLVSSENFDDYMKEVGVGFATRKVAGMAKPNMIISVNGDVITIKSESTFKNTEISFILGQEFDEVTADDRKVKSTITLDGGVLVHVQKWDGKSTTIKRKREDDKLVVECVMKGVTSTRVYERA

SEQ ID NO: 548 - protein, 206 aa, Homo sapiens
MAATRCLRWGLSRAGVWLLPPPARCPRRALHKQKDGTEFKSIYSLDKLYPESQGSDTAWRVPNGAKQADSDIPLDRLTISYCRSSGPGGQNVNKVNSKAEVRFHLATAEWIAEPVRQKIAITHKNKINRLGELILTSESSRYQFRNLADCLQKIRDMITEASQTPKEPTKEDVKLHRIRIENMNRERLRQKRIHSAVKTSRRVDMD

SEQ ID NO: 549 - protein, 527 aa, Homo sapiens
MENQEKASIAGHMFDVVVIGGGISGLSAAKLLTEYGVSVLVLEARDRVGGRTYTIRNEHVDYVDVGGAYVGPTQNRILRLSKELGIETYKVNVSERLVQYVKGKTYPFRGAFPPVWNPIAYLDYNNLWRTIDNMGKEIPTDAPWEAQHADKWDKMTMKELIDKICWTKTARRFAYLFVNINVTSEPHEVSALWFLWYVKQCGGTTRIFSVTNGGQERKFVGGSGQVSERIMDLLGDQVKLNHPVTHVDQSSDNIIIETLNHEHYECKYVINAIPPTLTAKIHFRPELPAERNQLIQRLPMGAVIKCMMYYKEAFWKKKDYCGCMIIEDEDAPISITLDDTKPDGSLPAIMGFILARKADRLAKLHKEIRKKKICELYAKVLGSQEALHPVHYEEKNWCEEQYSGGCYTAYFPPGIMTQYGRVIRQPVGRIFFAGTETATKWSGYMEGAVEAGERAAREVLNGLGKVTEKDIWVQEPESKDVPAVEITHTFWERNLPSVSGLLKIIGFSTSVTALGFVLYKYKLLPRS

SEQ ID NO: 550 - protein, 745 aa, Homo sapiens
MGVPFFSSLRCMVDLGPCWAGGLTAEMKLLLALAGLLAILATPQPSEGAAPAVLGEVDTSLVLSSMEEAKQLVDKAYKERRESIKQRLRSGSASPMELLSYFKQPVAATRTAVRAADYLHVALDLLERKLRSLWRRPFNVTDVLTPAQLNVLSKSSGCAYQDVGVTCPEQDKYRTITGMCNNRRSPTLGASNRAFVRWLPAEYEDGFSLPYGWTPGVKRNGFPVALARAVSNEIVRFPTDQLTPDQERSLMFMQWGQLLDHDLDFTPEPAARASFVTGVNCETSCVQQPPCFPLKIPPNDPRIKNQADCIPFFRSCPACPGSNITIRNQINALTSFVDASMVYGSEEPLARNLRNMSNQLGLLAVNQRFQDNGRALLPFDNLHDDPCLLTNRSARIPCFLAGDTRSSEMPELTSMHTLLLREHNRLATELKSLNPRWDGERLYQEARKIVGAMVQIITYRDYLPLVLGPTAMRKYLPTYRSYNDSVDPRIANVFTNAFRYGHTLIQPFMFRLDNRYQPMEPNPRVPLSRVFFASWRVVLEGGIDPILRGLMATPAKLNRQNQIAVDEIRERLFEQVMRIGLDLPALNMQRSRDHGLPGYNAWRRFCGLPQPETVGQLGTVLRNLKLARKLMEQYGTPNNIDIWMGGVSEPLKRKGRVGPLLACIIGTQFRKLRDGDRFWWENEGVFSMQQRQALAQISLPRIICDNTGITTVSKNNIFMSNSYPRDFVNCSTLPALNLASWREAS

SEQ ID NO: 551 - protein, 1265 aa, Homo sapiens
MSPALQDLSQPEGLKKTLRDEINAILQKRIMVLDGGMGTMIQREKLNEEHFRGQEFKDHARPLKGNNDILSITQPDVIYQIHKEYLLAGADIIETNTFSSTSIAQADYGLEHLAYRMNMCSAGVARKAAEEVTLQTGIKRFVAGALGPTNKTLSVSPSVERPDYRNITFDELVEAYQEQAKGLLDGGVDILLIETIFDTANAKAALFALQNLFEEKYAPRPIFISGTIVDKSGRTLSGQTGEGFVISVSHGEPLYIGLNCALGAAEMRPFIEIIGKCTTAYVLCYPNAGLPNTFGDYDETPSMMAKHLKDFAMDGLVNIVGGCCGSTPDHIREIAEAVKNCKPRVPPATAFEGHMLLSGLEPFRIGPYTNFVNIGERCNVAGSRKFAKLIMAGNYEEALCVAKVQVEMGAQVLDVNMDDGMLDGPSAMTRFCNLIASEPDIAKVPLCIDSSNFAVIEAGLKCCQGKCIVNSISLKEGEDDFLEKARKIKKYGAAMVVMAFDEEGQATETDTKIRVCTRAYHLLVKKLGFNPNDIIFDPNILTIGTGMEEHNLYAINFIHATKVIKETLPGARISGGLSNLSFSFRGMEAIREAMHGVFLYHAIKSGMDMGIVNAGNLPVYDDIHKELLQLCEDLIWNKDPEATEKLLRYAQTQGTGGKKVIQTDEWRNGPVEERLEYALVKGIEKHIIEDTEEARLNQKKYPRPLNIIEGPLMNGMKIVGDLFGAGKMFLPQVIKSARVMKKAVGHLIPFMEKEREETRVLNGTVEEEDPYQGTIVLATVKGDVHDIGKNIVGVVLGCNNFRVIDLGVMTPCDKILKAALDHKADIIGLSGLITPSLDEMIFVAKEMERLAIRIPLLIGGATTSKTHTAVKIAPRYSAPVIHVLDASKSVVVCSQLLDENLKDEYFEEIMEEYEDIRQDHYESLKERRYLPLSQARKSGFQMDWLSEPHPVKPTFIGTQVFEDYDLQKLVDYIDWKPFFDVWQLRGKYPNRGFPKIFNDKTVGGEARKVYDDAHNMLNTLISQKKLRARGVVGFWPAQSIQDDIHLYAEAAVPQAAEPIATFYGLRQQAEKDSASTEPYYCLSDFIAPLHSGIRDYLGLFAVACFGVEELSKAYEDDGDDYSSIMVKALGDRLAEAFAEELHERVRRELWAYCGSEQLDVADLRRLRYKGIRPAPGYPSQPDHTEKLTMWRLADIEQSTGIRLTESLAMAPASAVSGLYFSNLKSKYFAVGKISKDQVEDYALRKNISVAEVEKWLGPILGYDTD

SEQ ID NO: 552 - protein, 750 aa, Homo sapiens
MLRAKNQLFLLSPHYLRQVKESSGSRLIQQRLLHQQQPLHPEWAALAKKQLKGKNPEDLIWHTPEGISIKPLYSKRDTMDLPEELPGVKPFTRGPYPTMYTFRPWTIRQYAGFSTVEESNKFYKDNIKAGQQGLSVAFDLATHRGYDSDNPRVRGDVGMAGVAIDTVEDTKILFDGIPLEKMSVSMTMNGAVIPVLANFIVTGEEQGVPKEKLTGTIQNDILKEFMVRNTYIFPPEPSMKIIADIFEYTAKHMPKFNSISISGYHMQEAGADAILELAYTLADGLEYSRTGLQAGLTIDEFAPRLSFFWGIGMNFYMEIAKMRAGRRLWAHLIEKMFQPKNSKSLLLRAHCQTSGWSLTEQDPYNNIVRTAIEAMAAVFGGTQSLHTNSFDEALGLPTVKSARIARNTQIIIQEESGIPKVADPWGGSYMMECLTNDVYDAALKLINEIEEMGGMAKAVAEGIPKLRIEECAARRQARIDSGSEVIVGVNKYQLEKEDAVEVLAIDNTSVRNRQIEKLKKIKSSRDQALAEHCLAALTECAASGDGNILALAVDASRARCTVGEITDALKKVFGEHKANDRMVSGAYRQEFGESKEITSAIKRVHKFMEREGRRPRLLVAKMGQDGHDRGAKVIATGFADLGFDVDIGPLFQTPREVAQQAVDADVHAVGVSTLAAGHKTLVPELIKELNSLGRPDILVMCGGVIPPQDYEFLFEVGVSNVFGPGTRIPKAAVQVLDDIEKCLEKKQQSV

SEQ ID NO: 553 - protein, 396 aa, Homo sapiens
MLSEVLLVSAPGKVILHGEHAVVHGKVALAVSLNLRTFLRLQPHSNGKVDLSLPNIGIKRAWDVARLQSLDTSFLEQGDVTTPTSEQVEKLKEVAGLPDDCAVTERLAVLAFLYLYLSICRKQRALPSLDIVVWSELPPGAGLGSSAAYSVCLAAALLTVCEEIPNPLKDGDCVNRWTKEDLELINKWAFQGERMIHGNPSGVDNAVSTWGGALRYHQGKISSLKRSPALQILLTNTKVPRNTRALVAGVRNRLLKFPEIVAPLLTSIDAISLECERVLGEMGEAPAPEQYLVLEELIDMNQHHLNALGVGHASLDQLCQVTRARGLHSKLTGAGGGGCGITLLKPGLEQPEVEATKQALTSCGFDCLETSIGAPGVSIHSATSLDSRVQQALDGL

SEQ ID NO: 554 - protein, 1274 aa, Homo sapiens
MPEPGKKPVSAFSKKPRSVEVAAGSPAVFEAETERAGVKVRWQRGGSDISASNKYGLATEGTRHTLTVREVGPADQGSYAVIAGSSKVKFDLKVIEAEKAEPMLAPAPAPAEATGAPGEAPAPAAELGESAPSPKGSSSAALNGPTPGAPDDPIGLFVMRPQDGEVTVGGSITFSARVAGASLLKPPVVKWFKGKWVDLSSKVGQHLQLHDSYDRASKVYLFELHITDAQPAFTGSYRCEVSTKDKFECSNFNLTVHEAMGTGDLDLLSAFRRTSLAGGGRRISDSHEDTGILDFSSLLKKRDSFRTPRDSKLEAPAEEDVWEILRQAPPSEYERIAFQYGVTDLRGMLKRLKGMRRDEKKSTAFQKKLEPAYQVSKGHKIRLTVELADHDAEVKWLKNGQEIQMSGSKYIFESIGAKRTLTISQCSLADDAAYQCVVGGEKCSTELFVKEPPVLITRPLEDQLVMVGQRVEFECEVSEEGAQVKWLKDGVELTREETFKYRFKKDGQRHHLIINEAMLEDAGHYALCTSGGQALRELIVQEKKLEVYQSIADLMVGAKDQAVFKCEVSDENVRGVWLKNGKELVPDSRIKVSHIGRVHKLTIDDVTPADEADYSFVPEGFACNLSAKLHFMEVKIDFVPRQEPPKIHLDCPGRIPDTIVVVAGNKLRLDVPISGDPAPTVIWQKAITQGNKAPARPAPDAPEDTGDSDEWVFDKKLLCETEGRVRVETTKDRSIFTVEGAEKEDEGVYTVTVKNPVGEDQVNLTVKVIDVPDAPAAPKISNVGEDSCTVQWEPPAYDGGQPILGYILERKKKKSYRWMQLNFDLIQELSHEARRMIEGVVYEMRVYAVNAIGMSRPSPASQPFMPIGPPSEPTHLAVEDVSDTTVSLKWRPPERVGAGGLDGYSVEYCPEGCSEWVAALQGLTEHTSILVKDLPTGARLLFRVRAHNMAGPGAPVTTTEPVTVQEILQRPRLQLPRHLRQTIQKKVGEPVNLLIPFQGKPRPQVTWTKEGQPLAGEEVSIRNSPTDTILFIRAARRVHSGTYQVTVRIENMEDKATLVLQVVDKPSPPQDLRVTDAWGLNVALEWKPPQDVGNTELWGYTVQKADKKTMEWFTVLEHYRRTHCVVPELIIGNGYYFRVFSQNMVGFSDRAATTKEPVFIPRPGITYEPPNYKALDFSEAPSFTQPLVNRSVIAGYTAMLCCAVRGSPKPKISWFKNGLDLGEDARFRMFSKQGVLTLEIRKPCPFDGGIYVCRATNLQGEARCECRLEVRVPQ

SEQ ID NO: 555 - protein, 166 aa, Homo sapiens
MAPKKAKKRAGGANSNVFSMFEQTQIQEFKEAFTIMDQNRDGFIDKNDLRDTFAALGRVNVKNEEIDEMIKEAPGPINFTVFLSMFGEKLKGADPEETILNAFKVFDPEGKGVLKADYVREMLTTQAERFSKEEVDQMFAAFPPDVTGNLDYKNLVHIITHGEEKD

SEQ ID NO: 556 - protein, 520 aa, Homo sapiens
MAALKLLSSGLRLCASARGSGATWYKGCVCSFSTSAHRHTKFYTDPVEAVKDIPDGATVLVGGFGLCGIPENLIDALLKTGVKGLTAVSNNAGVDNFGLGLLLRSKQIKRMVSSYVGENAEFERQYLSGELEVELTPQGTLAERIRAGGAGVPAFYTPTGYGTLVQEGGSPIKYNKDGSVAIASKPREVREFNGQHFILEEAITGDFALVKAWKADRAGNVIFRKSARNFNLPMCKAAETTVVEVEEIVDIGAFAPEDIHIPQIYVHRLIKGEKYEKRIERLSIRKEGDGEAKSAKPGDDVRERIIKRAALEFEDGMYANLGIGIPLLASNFISPNITVHLQSENGVLGLGPYPRQHEADADLINAGKETVTILPGASFFSSDESFAMIRGGHVDLTMLGAMQVSKYGDLANWMIPGKMVKGMGGAMDLVSSAKTKVVVTMEHSAKGNAHKIMEKCTLPLTGKQCVNRIITEKAVFDVDKKKGLTLIELWEGLTVDDVQKSTGCDFAVSPKLMPMQQIAN

SEQ ID NO: 557 - protein, 520 aa, Homo sapiens; identical to SEQ ID NO: 556

SEQ ID NO: 558 - protein, 703 aa, Homo sapiens
MLSAALRTLKHVLYYSRQCLMVSRNLGSVGYDPNEKTFDKILVANRGEIACRVIRTCKKMGIKTVAIHSDVDASSVHVKMADEAVCVGPAPTSKSYLNMDAIMEAIKKTRAQAVHPGYGFLSENKEFARCLAAEDVVFIGPDTHAIQAMGDKIESKLLAKKAEVNTIPGFDGVVKDAEEAVRIAREIGYPVMIKASAGGGGKGMRIAWDDEETRDGFRLSSQEAASSFGDDRLLIEKFIDNPRHIEIQVLGDKHGNALWLNERECSIQRRNQKVVEEAPSIFLDAETRRAMGEQAVALARAVKYSSAGTVEFLVDSKKNFYFLEMNTRLQVEHPVTECITGLDLVQEMIRVAKGYPLRHKQADIRINGWAVECRVYAEDPYKSFGLPSIGRLSQYQEPLHLPGVRVDSGIQPGSDISIYYDPMISKLITYGSDRTEALKRMADALDNYVIRGVTHNIALLREVIINSRFVKGDISTKFLSDVYPDGFKGHMLTKSEKNQLLAIASSLFVAFQLRAQHFQENSRMPVIKPDIANWELSVKLHDKVHTVVASNNGSVFSVEVDGSKLNVTSTWNLASPLLSVSVDGTQRTVQCLSREAGGNMSIQFLGTVYKVNILTRLAAELNKFMLEKVTEDTSSVLRSPMPGVVVAVSVKPGDAVAEGQEICVIEAMKMQNSMTAGKTGTVKSVHCQAGDTVGEGDLLVELE

SEQ ID NO: 559 - protein, 389 aa, Homo sapiens
MLSLRVPLAPITDPQQLQLSPLKGLSLVDKENTPPALSGTRVLASKTARRIFQEPTEPKTKAAAPGVEDEPLLRENPRRFVIFPIEYHDIWQMYKKAEASFWTAEEVDLSKDIQHWESLKPEERYFISHVLAFFAASDGIVNENLVERFSQEVQITEARCFYGFQIAMENIHSEMYSLLIDTYIKDPKEREFLFNAIETMPCVKKKADWALRWIGDKEATYGERVVAFAAVEGIFFSGSFASIFWLKKRGLMPGLTFSNELISRDEGLHCDFACLMFKHLVHKPSEERVREIIINAVRIEQEFLTEALPVKLIGMNCTLMKQYIEFVADRLMLELGFSKVFRVENPFDFMENISLEGKTNFFEKRVGEYQRMGVMSSPTENSFTLDADF

SEQ ID NO: 560 - protein, 488 aa, Homo sapiens
MGTLLGLGAVLAYQDHRCRAAQESTHIYTKEEVSSHTSPETGIWVTLGSEVFDVTEFVDLHPGGPSKLMLAAGGPLEPFWALYAVHNQSHVRELLAQYKIGELNPEDKVAPTVETSDPYADDPVRHPALKVNSQRPFNAEPPPELLTENYITPNPIFFTRNHLPVPNLDPDTYRLHVVGAPGGQSLSLSLDDLHNFPRYEITVTLQCAGNRRSEMTQVKEVKGLEWRTGAISTARWAGARLCDVLAQAGHQLCETEAHVCFEGLDSDPTGTAYGASIPLARAMDPEAEVLLAYEMNGQPLPRDHGFPVRVVVPGVVGARHVKWLGRVSVQPEESYSHWQRRDYKGFSPSVDWETVDFDSAPSIQELPVQSAITEPRDGETVESGEVTIKGYAWSGGGRAVIRVDVSLDGGLTWQVAKLDGEEQRPRKAWAWRLWQLKAPVPAGQKELNIVCKAVDDGYNVQPDTVAPIWNLRGVLSNAWHRVHVYVSP

SEQ ID NO: 561 - protein, 488 aa, Homo sapiens; identical to SEQ ID NO: 560

SEQ ID NO: 562 - protein, 2273 aa, Homo sapiens
MGFVRQIQLLLWKNWTLRKRQKIRFVVELVWPLSLFLVLIWLRNANPLYSHHECHFPNKAMPSAGMLPWLQGIFCNVNNPCFQSPTPGESPGIVSNYNNSILARVYRDFQELLMNAPESQHLGRIWTELHILSQFMDTLRTHPERIAGRGIRIRDILKDEETLTLFLIKNIGLSDSVVYLLINSQVRPEQFAHGVPDLALKDIACSEALLERFIIFSQRRGAKTVRYALCSLSQGTLQWIEDTLYANVDFFKLFRVLPTLLDSRSQGINLRSWGGILSDMSPRIQEFIHRPSMQDLLWVTRPLMQNGGPETFTKLMGILSDLLCGYPEGGGSRVLSFNWYEDNNYKAFLGIDSTRKDPIYSYDRRTTSFCNALIQSLESNPLTKIAWRAAKPLLMGKILYTPDSPAARRILKNANSTFEELEHVRKLVKAWEEVGPQIWYFFDNSTQMNMIRDTLGNPTVKDFLNRQLGEEGITAEAILNFLYKGPRESQADDMANFDWRDIFNITDRTLRLVNQYLECLVLDKFESYNDETQLTQRALSLLEENMFWAGVVFPDMYPWTSSLPPHVKYKIRMDIDVVEKTNKIKDRYWDSGPRADPVEDFRYIWGGFAYLQDMVEQGITRSQVQAEAPVGIYLQQMPYPCFVDDSFMIILNRCFPIFMVLAWIYSVSMTVKSIVLEKELRLKETLKNQGVSNAVIWCTWFLDSFSIMSMSIFLLTIFIMHGRILHYSDPFILFLFLLAFSTATIMLCFLLSTFFSKASLAAACSGVIYFTLYLPHILCFAWQDRMTAELKKAVSLLSPVAFGFGTEYLVRFEEQGLGLQWSNIGNSPTEGDEFSFLLSMQMMLLDAACYGLLAWYLDQVFPGDYGTPLPWYFLLQESYWLSGEGCSTREERALEKTEPLTEETEDPEHPEGIHDSFFEREHPGWVPGVCVKNLVKIFEPCGRPAVDRLNITFYENQITAFLGHNGAGKTTTLSILTGLLPPTSGTVLVGGRDIETSLDAVRQSLGMCPQHNILFHHLTVAEHMLFYAQLKGKSQEEAQLEMEAMLEDTGLHHKRNEEAQDLSGGMQRKLSVAIAFVGDAKVVILDEPTSGVDPYSRRSIWDLLLKYRSGRTIIMPTHHMDEADHQGDRIAIIAQGRLYCSGTPLFLKNCFGTGLYLTLVRKMKNIQSQRKGSEGTCSCSSKGFSTTCPAHVDDLTPEQVLDGDVNELMDVVLHHVPEAKLVECIGQELIFLLPNKNFKHRAYASLFRELEETLADLGLSSFGISDTPLEEIFLKVTEDSDSGPLFAGGAQQKRENVNPRHPCLGPREKAGQTPQDSNVCSPGAPAAHPEGQPPPEPECPGPQLNTGTQLVLQHVQALLVKRFQHTIRSHKDFLAQIVLPATFVFLALMLSIVILPFGEYPALTLHPWIYGQQYTFFSMDEPGSEQFTVLADVLLNKPGFGNRCLKEGWLPEYPCGNSTPWKTPSVSPNITQLFQKQKWTQVNPSPSCRCSTREKLTMLPECPEGAGGLPPPQRTQRSTEILQDLTDRNISDFLVKTYPALIRSSLKSKFWVNEQRYGGISIGGKLPVVPITGEALVGFLSDLGRIMNVSGGPITREASKEIPDFLKHLETEDNIKVWFNNKGWHALVSFLNVAHNAILRASLPKDRSPEEYGITVISQPLNLTKEQLSEITVLTTSVDAVVAICVIFSMSFVPASFVLYLIQERVNKSKHLQFISGVSPTTYWVTNFLWDIMNYSVSAGLVVGIFIGFQKKAYTSPENLPALVALLLLYGWAVIPMMYPASFLFDVPSTAYVALSCANLFIGINSSAITFILELFDNNRTLLRFNAVLRKLLIVFPHFCLGRGLIDLALSQAVTDVYARFGEEHSANPFHWDLIGKNLFAMVVEGVVYFLLTLLVQRHFFLSQWIAEPTKEPIVDEDDDVAEERQRIITGGNKTDILRLHELTKIYLGTSSPAVDRLCVGVRPGECFGLLGVNGAGKTTTFKMLTGDTTVTSGDATVAGKSILTNISEVHQNMGYCPQFDAIDELLTGREHLYLYARLRGVPAEEIEKVANWSIKSLGLTVYADCLAGTYSGGNKRKLSTAIALIGCPPLVLLDEPTTGMDPQARRMLWNVIVSIIRKGRAVVLTSHSMEECEALCTRLAIMVKGAFRCMGTIQHLKSKFGDGYIVTMKIKSPKDDLLPDLNPVEQFFQGNFPGSVQRERHYNMLQFQVSSSSLARIFQLLLSHKDSLLIEEYSVTQTTLDQVFVNFAKQQTESHDLPLHPRAAGASRQAQD

SEQ ID NO: 563 - protein, 1437 aa, Homo sapiens [sequence omitted]

SEQ ID NO: 564 - protein, 348 aa, Homo sapiens
RKLAYSGSESGADGRKAAEPEVEVEVYRRDSKKLPGLGDPDIDWEESVCLNLILQKLDYMVTCAVCTRADGGDIHIHKKKSQQVFASPSKHPMDSKGEESKISYPNIFFMIDSFEEVFSDMTVGEGEMVCVELVASDKTNTFQGVIFQGSIRYEALKKVYDNRVSVAARMAQKMSFGFYKYSNMEFVRMKGPQGKGHAEMAVSRVSTGDTSPCGTEEDSSPASPMHERVTSFSTPPTPERNNRPAFFSPSLKRKVPRNRIAEMKKSHSANDSEEFFREDDGGADLHNATNLRSRSLSGTGRSLVGSWLKLNRADGNFLLYAHLTYVTLPLHRILTDILEVRQKPILMT

SEQ ID NO: 565 - protein, 891 aa, Homo sapiens
ARMNCERELHKLEGNLKLNRESMENLESSQRHLAEELRKKELELSQMNSKVENEKGLVAQLQKTVKELQTQIKDLKEKLEAERTTRAKMERERADLTQDLADLNERLEEVGGSSLAQLEITKKQETKFQKLHRDMEEATLHFETTSASLKKRHADSLAELEGQVENLQQVKQKLEKDKSDLQLEVDDLLTRVEQMTRAKANAEKLCTLYEERLHEATAKLDKVTQLANDLAAQKTKLWSESGEFLRRLEEKEALINQLSREKSNFTRQIEDLRGQLEKETKSQSALAHALQKAQRDCDLLREQYEEEQEVKAELHRTLSKVNAEMVQWRMKYENNVIQRTEDLEDAKKELAIRLQEAAEAMGVANARNASLERARHQLQLELGDALSDLGKVRSAAARLDQKQLQSGKALADWKQKHEESQALLDASQKEVQALSTELLKLKNTYEESIVGQETLRRENKNLQEEISNLTNQVREGTKNLTEMEKVKKLIEEEKTEVQVTLEETEGALERNESKILHFQLELLEAKAELERKLSEKDEEIENFRRKQQCTIDSLQSSLDSEAKSRIEVTRLKKKMEEDLNEMELQLSCANRQVSEATKSLGQLQIQIKDLQMQLDDSTQLNSDLKEQVAVAERRNSLLQSELEDLRSLQEQTERGRRLSEEELLEATERINLFYTQNTSLLSQKKKLEADVARMQKEAEEVVQECQNAEEKAKKAAIEAANLSEELKKKQDTIAHLERTRENMEQTITDLQKRLAEAEQMALMGSRKQIQKLESRVRELEGELEGEIRRSAEAQRGARRLERCIKELTYQAEEDKKNLSRMQTQMDKLQLKVQNYKQQVEVAETQANQYLSKYKKQQHELNEVKERAEVAESQVNKLKIKAREFGKKVQEE

SEQ ID NO: 566 - protein, 609 aa, Homo sapiens
MFRCGGLAAGALKQKLVPLVRTVCVRSPRQRNRLPVVQSHHLGSPSRSLASTGASGKDGSNLVYFLIVGATVTGAGVYYAYKTMKEDEKRYNERISGLGLTPEQKQKKAALSASEGEEVPQDKAPSHVPFLLIGGGTAAFAAARSIRARDPGARVLIVSEDPELPYMRPPLSKELWFSDDPNVTKTLRFKQWNGKERSIYFQPPSFYVSAQDLPHIENGGVAVLTGKKVVQLDVRDNMVKLNDGSQITYEKCLIATGGTPRSLSAIDRAGAEVKSRTTLFRKIGDFRSLEKISREVKSITIIGGGFLGSELACALGRKARALGTEVIQLFPEKGNMGKILPEYLSNWTMEKVRREGVKVMPNAIVQSVGVSSGKLLIKLKDGRKVETDHIVAAVGLEPNVELAKTGGLEIDSDFGGFRVNAELQARSNIWVAGDAACFYDIKLGRRRVEHHDHAVVSGRLAGENMTGAAKPYWHQSMFWSDLGPDVGYEAIGLVDSSLPTVGVFAKATAQDNPKSATEQSGTGIRSESETESEASEITIPPSTPAVPQAPVQGEDYGKGVIFYLRDKVVVGIVLWNIFNRMPIARKIIKDGEQHEDLNEVAKLFNIHED

SEQ ID NO: 567 - protein, 231 aa, Homo sapiens [sequence omitted]

SEQ ID NO: 568 - protein, 933 aa, Homo sapiens [sequence omitted]

SEQ ID NO: 569 - protein, 186 aa, Homo sapiens [sequence omitted]

SEQ ID NO: 570 - protein, 520 aa, Homo sapiens [sequence omitted]

SEQ ID NO: 571 - protein, 613 aa, Homo sapiens
MFRCGGLAAGALKQKLVPLVRTVCVRSPRQRNRLPGNLFQRWHVPLELQMTRQMASSGASGGKIDNSVLVLIVGLSTVGAGAYAYKTMKEDEKRYNERISGLGLTPEQKQKKAALSASEGEEVPQDKAPSHVPFLLIGGGTAAFAAARSIRARDPGARVLIVSEDPELPYMRPPLSKELWFSDDPNVTKTLRFKQWNGKERSIYFQPPSFYVSAQDLPHIENGGVAVLTGKKVVQLDVRDNMVKLNDGSQITYEKCLIATGGTPRSLSAIDRAGAEVKSRTTLFRKIGDFRSLEKISREVKSITIIGGGFLGSELACALGRKARALGTEVIQLFPEKGNMGKILPEYLSNWTMEKVRREGVKVMPNAIVQSVGVSSGKLLIKLKDGRKVETDHIVAAVGLEPNVELAKTGGLEIDSDFGGFRVNAELQARSNIWVAGDAACFYDIKLGRRRVEHHDHAVVSGRLAGENMTGAAKPYWHQSMFWSDLGPDVGYEAIGLVDSSLPTVGVFAKATAQDNPKSATEQSGTGIRSESETESEASEITIPPSTPAVPQAPVQGEDYGKGVIFYLRDKVVVGIVLWNIFNRMPIARKIIKDGEQHEDLNEVAKLFNIHED

SEQ ID NO: 572 - protein, 474 aa, Homo sapiens
MSSEDREAQEDELLALASIYDGDEFRKAESVQGGETRIYLDLPQNFKIFVSGNSNECLQNSGFEYTICFLPPLVLNFELPPDYPSSSPPSFTLSGKWLSPTQLSALCKHLDNLWEEHRGSVVLFAWMQFLKEETLAYLNIVSPFELKIGSQKKVQRRTAQASPNTELDFGGAAGSDVDQEEIVDERAVQDVESLSNLIQEILDFDQAQQIKCFNSKLFLCSICFCEKLGSECMYFLECRHVYCKACLKDYFEIQIRDGQVQCLNCPEPKCPSVATPGQVKELVEAELFARYDRLLLQSSLDLMADVVYCPRPCCQLPVMQEPGCTMGICSSCNFAFCTLCRLTYHGVSPCKVTAEKLMDLRNEYLQADEANKRLLDQRYGKRVIQKALEEMESKEWLEKNSKSCPCCGTPIEKLDGCNKMTCTGCMQYFCWICMGSLSRANPYKHFNDPGSPCFNRLFYAVDVDDDIWEDEVED

SEQ ID NO: 573 - protein, 395 aa, Homo sapiens
MPGRSCVALVLLAAAVSCAVAQHAPPWTEDCRKSTYPPSGPTYRGAVPWYTINLDLPPYKRWHELMLDKAPMLKVIVNSLKNMINTFVPSGKVMQVVDEKLPGLLGNFPGPFEEEMKGIAAVTDIPLGEIISFNIFYELFTICTSIVAEDKKGHLIHGRNMDFGVFLGWNINNDTWVITEQLKPLTVNLDFQRNNKTVFKASSFAGYVGMLTGFKPGLFSLTLNERFSINGGYLGILEWILGKKDAMWIGFLTRTVLENSTSYEEAKNLLTKTKILAPAYFILGGNQSGEGCVITRDRKESLDVYELDAKQGRWYVVQTNYDRWKHPFFLDDRRTPAKMCLNRTSQENISFETMYDVLSTKPVLNKLTVYTTLIDVTKGQFETYLRDCPDPCIGW

SEQ ID NO: 574 - protein, 419 aa, Homo sapiens
MPLSDFILALKDNPYFGAGFGLVGVGTALALARKGVQLGLVAFRRHYMITLEVPARDRSYAWLLSWLTRHSTRTQHLSVETSYLQHESGRISTKFEFVPSPGNHFIWYRGKWIRVERSREMQMIDLQTGTPWESVTFTALGTDRKVFFNILEEARELALQQEEGKTVMYTAVGSEWRPFGYPRRRRPLNSVVLQQGLADRIVRDVQEFIDNPKWYTDRGIPYRRGYLLYGPPGCGKSSFITALAGELEHSICLLSLTDSSLSDDRLNHLLSVAPQQSLVLLEDVDAAFLSRDLAVENPVKYQGLGRLTFSGLLNALDGVASTEARIVFMTTNHVDRLDPALIRPGRVDLKEYVGYCSHWQLTQMFQRFYPGQAPSLAENFAEHVLRATNQISPAQVQGYFMLYKNDPVGAIHNAESLRR

SEQ ID NO: 575 - protein, 576 aa, Homo sapiens
MAASETVRLRLQFDYPPPATPHCTAFWLLVDLNRCRVVTDLISLIRQRFGFSSGAFLGLYLEGGLLPPAESARLVRDNDCLRVKLEERGVAENSVVISNGDINLSLRKAKKRAFQLEEGEETEPDCKYSKKHWKSRENNNNNEKVLDLEPKAVTDQTVSKKNKRKNKATCGTVGDDNEEAKRKSPKKKEKCEYKKKAKNPKSPKVQAVKDWANQRCSSPKGSARNSLVKAKRKGSVSVCSKESPSSSSESESCDESISDGPSKVTLEARNSSEKLPTELSKEEPSTKNTTADKLAIKLGFSLTPSKGKTSGTTSSSSDSSAESDDQCLMSSSTPECAAGFLKTVGLFAGRGRPGPGLSSQTAGAAGWRRSGSNGGGQAPGASPSVSLPASLGRGWGREENLFSWKGAKGRGMRGRGRGRGHPVSCVVNRSTDNQRQQQLNDVVKNSSTIIQNPVETPKKDYSLLPLLAAAPQVGEKIAFKLLELTSSYSPDVSDYKEGRILSHNPETQQVDIEILSSLPALREPGKFDLVYHNENGAEVVEYAVTQESKITVFWKELIDPRLIIESPSNTSSTEPA

SEQ ID NO: 576 - protein, 1224 aa, Homo sapiens
MLTKFETKSARVKGLSFHPKRPWILTSLHNGVIQLWDYRMCTLIDKFDEHDGPVRGIDFHKQQPLFVSGGDDYKIKVWNYKLRRCLFTLLGHLDYIRTTFFHHEYPWILSASDDQTIRVWNWQSRTCVCVLTGHNHYVMCAQFHPTEDLVVSASLDQTVRVWDISGLRKKNLSPGAVESDVRGITGVDLFGTTDAVVKHVLEGHDRGVNWAAFHPTMPLIVSGADDRQVKIWRMNESKAWEVDTCRGHYNNVSCAVFHPRQELILSNSEDKSIRVWDMSKRTGVQTFRRDHDRFWVLAAHPNLNLFAAGHDGGMIVFKLERERPAYAVHGNMLHYVKDRFLRQLDFNSSKDVAVMQLRSGSKFPVFNMSYNPAENAVLLCTRASNLENSTYDLYTIPKDADSQNPDAPEGKRSSGLTAVWVARNRFAVLDRMHSLLIKNLKNEITKKVQVPNCDEIFYAGTGNLLLRDADSITLFDVQQKRTLASVKISKVKYVIWSADMSHVALLAKHAIVICNRKLDALCNIHENIRVKSGAWDESGVFIYTTSNHIKYAVTTGDHGIIRTLDLPIYVTRVKGNNVYCLDRECRPRVLTIDPTEFKFKLALINRKYDEVLHMVRNAKLVGQSIIAYLQKKGYPEVALHFVKDEKTRFSLALECGNIEIALEAAKALDDKNCWEKLGEVALLQGNHQIVEMCYQRTKNFDKVSFLYLITGNLEKLRKMMKIAEIRKDMSGHYQNALYLGDVSERVRILKNCGQKSLAYLTAATHGLDEEAESLKETFDPEKETIPDIDPNAKLLQPPAPIMPLDTNWPLLTVSKGFFEGTIASKGKGGALAADIDIDTVGTEGWGEDAELQLDEDGFVEATEGLGDDALGKGQEEGGGWDVEEDLELPPELDISPGAAGGAEDGFFVPPTKGTSPTQIWCNNSQLPVDHILAGSFETAMRLLHDQVGVIQFGPYKQLFLQTYARGRTTYQALPCLPSMYGYPNRNWKDAGLKNGVPAVGLKLNDLIQRLQLCYQLTTVGKFEEAVEKFRSILLSVPLLVVDNKQEIAEAQQLITICREYIVGLSVETERKKLPKETLEQQKRICEMAAYFTHSNLQPVHMILVLRTALNLFFKLKNFKTAATFARRLLELGPKPEVAQQTRKILSACEKNPTDAYQLNYDMHNPFDICAASYRPIYRGKPVEKCPLSGACYSPEFKGQICRVTTVTEIGKDVIGLRISPLQFR

SEQ ID NO: 577 - protein, 150 aa, Homo sapiens
MLGAALRRCAVAATTRADPRGLLHSARTPGPAVAIQSVRCYSHGSQETDEEFDARWVTYFNKPDIDAWELRKGINTLVTYDMVPEPKIIDAALRACRRLNDFASLVRILEVVKDKAGPHKEIYPYVIQELRPTLNELGISTPEELGLDKV

SEQ ID NO: 578 - protein, 75 aa, Homo sapiens
MAPEVLPKPRMRGLLARRLRNHMAVAFVLSLGVAALYKFRVADQRKKAYADFYRNYDVMKDFEEMRKAGIFQSVK

SEQ ID NO: 579 - protein, 398 aa, Homo sapiens
MMLKGITRLISRIHKLDPGRFLHMGTQARQSIAAHLDNQVPVESPRAISRTNENDPAKHGDQHEGQHYNISPQDLETVFPHGLPPRFVMQVKTFSEACLMVRKPALELLHYLKNTSFAYPAIRYLLYGEKGTGKTLSLCHVIHFCAKQDWLILHIPDAHLWVKNCRDLLQSSYNKQRFDQPLEASTWLKNFKTTNERFLNQIKVQEKYVWNKRESTEKGSPLGEVVEQGITRVRNATDAVGIVLKELKRQSSLGMFHLLVAVDGINALWGRTTLKREDKSPIAPEELALVHNLRKMMKNDWHGGAIVSALSQTGSLFKPRKAYLPQELLGKEGFDALDPFIPILVSNYNPKEFESCIQYYLENNWLQHEKAPTEEGKKELLFLSNANPSLLERHCAYL

SEQ ID NO: 580 - protein, 398 aa, Homo sapiens; identical to SEQ ID NO: 579

SEQ ID NO: 581 - protein, 102 aa, Homo sapiens
MSSPPEGKLETKAGHPPAVKAGGMRIVQKHPHTGDTKEEKDKDDQEWESPSPPKPTVFISGVIARGDKDFPPAAAQVAHQKPHASMDKHPSPRTQHIQQPRK

SEQ ID NO: 582 - protein, 1065 aa, Homo sapiens
MDAAGRGCHLLPLPAARGPARAPAAAAAAAASPPGPCSGAACAPSAAAGAGAMNPSSSAGEEKGATGGSSSSGSGAGSCCLGAEGGADPRGAGSAAAAGAAALDEPAAAGQKEKDEALEEKLRNLTFRKQVSYRKAISRAGLQHLAPAHPLSLPVANGPAKEPRATLDWSENAVNGEHLWLETNVSGDLCYLGEENCQVRFAKSALRRKCAVCKIVVHTACIEQLEKINFRCKPTFREGGSRSPRENFVRHHWVHRRRQEGKCKQCGKGFQQKFSFHSKEIVAISCSWCKQAFHNKVTCFMLHHIEEPCSLGAHAAVIVPPTWIIKVKKPQNSLKASNRKKKRTSFKRKASKRGMEQENKGRPFVIKPISSPLMKPLLVFVNPKSGGNQGTKVLQMFMWYLNPRQVFDLSQEGPKDALELYRKVPNLRILACGGDGTVGWILSILDELQLSPQPPVGVLPLGTGNDLARTLNWGGGYTDEPVSKILCQVEDGTVVQLDRWNLHVERNPDLPPEELEDGVCKLPLNVFNNYFSLGFDAHVTLEFHESREANPEKFNSRFRNKMFYAGAAFSDFLQRSSRDLSKHVKVVCDGTDLTPKIQELKFQCIVFLNIPRYCAGTMPWGNPGDHHDFEPQRHDDGYIEVIGFTMASLAALQVGGHGERLHQCREVMLLTYKSIPMQVDGEPCRLAPAMIRISLRNQANMVQKSKRRTSMPLLNDPQSVPDRLRIRVNKISLQDYEGFHYDKEKLREASISDWLRTIAGELVQSFGAIPLGILVVRGDCDLETCRMYIDRLQEDLQSVSSGSQRVHYQDHETSFPRALSAQRLSPRWCFLDDRSQEHLHFVMEISQDEIFILDPDMVVSQPAGTPPGMPDLVVEQASGISDWWNPALRKRMLSDSGLGMIAPYYEDSDLKDLSHSRVLQSPVSSEDHAILQAVIAGDLMKLIESYKNGGSLLIQGPDHCSLLHYAAKTGNGEIVKYILDHGPSELLDMADSETGETALHKAACQRNRAVCQLLVDAGASLRKTDSKGKTPQERAQQAGDPDLAAYLESRQNYKVIGHEDLETAV

SEQ ID NO: 583 - protein, 414 aa, Homo sapiens
MIPLEKPGSGGSSPGATSGSGRAGRGLSGPCRPPPPPQARGLLTEIRAVVRTEPFQDGYSLCPGRELGRGKFAVVRKCIKKDSGKEFAAKFMRKRRKGQDCRMEIIHEIAVLELAQDNPWVINLHEVYETASEMILVLEYAAGGEIFDQCVADREEAFKEKDVQRLMRQILEGVHFLHTRDVVHLDLKPQNILLTSESPLGDIKIVDFGLSRILKNSEELREIMGTPEYVAPEILSYDPISMATDMWSIGVLTYVMLTGISPFLGNDKQETFLNISQMNLSYSEEEFDVLSESAVDFIRTLLVKKPEDRATAEECLKHPWLTQSSIQEPSFRMEKALEEANALQEGHSVPEINSDTDKSETEESIVTEELIVVTSYTLGQCRQSEKEKMEQKAISKRFKFEEPLLQEIPGEFIY

SEQ ID NO: 584 - protein, 433 aa, Homo sapiens [sequence omitted]

SEQ ID NO: 585 - protein, 617 aa, Homo sapiens
MLVPLAKLSCLAYQCFHALKIKKNYLPLCAIRWSSTSTVPRITTHYTIYPRDKDKRWEGVNMERFAEEADVVIVGAGPAGLSAAVRLKQLAVAHEKDIRVCLVEKAAQIGAHTLSGACLDPGAFKELFPDWKEKGAPLNTPVTEDRFGILTEKYRIPVPILPGLPMNNHGNYIVRLGHLVSWMGEQAEALGVEVYPGYAAAEVLFHDDGSVKGIATNDVGIQKDGAPKATFERGLELHAKVTIFAEGCHGHLAKQLYKKFDLRANCEPQTYGIGLKELWVIDEKNWKPGRVDHTVGWPLDRHTYGGSFLYHLNEGEPLVALGLVVGLDYQNPYLSPFREFQRWKHHPSIRPTLEGGKRIAYGARALNEGGFQSIPKLTFPGGLLIGCSPGFMNVPKIKGTHTAMKSGILAAESIFNQLTSENLQSKTIGLHVTEYEDNLKNSWVWKELYSVRNIRPSCHGVLGVYGGMIYTGIFYWILRGMEPWTLKHKGSDFERLKPAKDCTPIEYPKPDGQISFDLLSSVALSGTNHEHDQPAHLTLRDDSIPVNRNLSIYDGPEQRFCPAGVYEFVPVEQGDGFRLQINAQNCVHCKTCDIKDPSQNINWVVPEGGGGPAYNGM

SEQ ID NO: 586 - protein, 184 aa, Homo sapiens
MAAAGGARLLRAASAVLGGPAGRWLHHAGSRAGSSGLLRNRGPGGSAEASRSLSVSARARSSSEDKITVHFINRDGETLTTKGKVGDSLLDVVVENNLDIDGFGACEGTLACSTCHLIFEDHIYEKLDAITDEENDMLDLAYGLTDRSRLGCQICLTKSMDNMTVRVPETVADARQSIDVGKTS

SEQ ID NO: 587 - protein, 584 aa, Homo sapiens
MDEGCGETIYVIGQGSDGTEYGLSEADMEASYATVKSMAEQIEADVILLRERQEAGGRVRDYLVRKRVGDNDFLEVRVAVVGNVDAGKSTLLGVLTHGELDNGRGFARQKLFRHKHEIESGRTSSVGNDILGFDSEGNVVNKPDSHGGSLEWTKICEKSTKVITFIDLAGHEKYLKTTVFGMTGHLPDFCMLMVGSNAGIVGMTKEHLGLALALNVPVFVVVTKIDMCPANILQETLKLLQRLLKSPGCRKIPVLVQSKDDVIVTASNFSSERMCPIFQISNVTGENLDLLKMFLNLLSPRTSYREEEPAEFQIDDTYSVPGVGTVVSGTTLRGLIKLNDTLLLGPDPLGNFLSIAVKSIHRKRMPVKEVRGGQTASFALKKIKRSSIRKGMVMVSPRLNPQASWEFEAEILVLHHPTTISPRYQAMVHCGSIRQTATILSMDKDCLRTGDKATVHFRFIKTPEYLHIDQRLVFREGRTKAVGTITKLLQTTNNSPMNSKPQQIKMQSTKKGPLTKRDEGGPSGGPAVGAPPPGDEASSVGAGQPAASSNLQPQPKPSSGGRRRGGQRHKVKSQGACVTPASGC

SEQ ID NO: 588 - protein, 791 aa, Homo sapiens
MWNMLIVAMCLALLGCLQAQELQGHVSIILLGATGDLAKKYLWQGLFQLYLDEAGRGHSFSFHGAALTAPKQGQELMAKALESLSCPKDMAPSHCAEHKDQFLQLSQYRQLKTAEDYQALNKDIEAQLQHAGLREAGRIFYFSVPPFAYEDIARNINSSCRPGPGAWLRVVLEKPFGHDHFSAQQLATELGTFFQEEEMYRVDHYLGKQAVAQILPFRDQNRKALDGLWNRHHVERVEIIMKETVDAEGRTSFYEEYGVIRDVLQNHLTEVLTLVAMELPHNVSSAEAVLRHKLQVFQALRGLQRGSAVVGQYQSYSEQVRRELQKPDSFHSLTPTFAGVLVHIDNLRWEGVPFILMSGKALDERVGYARILFKNQACCVQSEKHWAAAQSQCLPRQLVFHIGHGDLGSPAVLVSRNLFRPSLPSSWKEMEGPPGLRLFGSPLSDYYAYSPVRERDAHSVLLSHIFHGRKNFFITTENLLASWNFWTPLLESLAHKAPRLYPGGAENGRLLDFEFSSGRLFFSQQQPEQLVPGPGPAPMPSDFQVLRAKYRESPLVSAWSEELISKLANDIEATAVRAVRRFGQFHLALSGGSSPVALFQQLATAHYGFPWAHTHLWLVDERCVPLSDPESNFQGLQAHLLQHVRIPYYNIHPMPVHLQQRLCAEEDQGAQIYAREISALVANSSFDLVLLGMGADGHTASLFPQSPTGLDGEQLVVLTTSPSQPHRRMSLSLPLINRAKKVAVLVMGRMKREITTLVSRVGHEPKKWPISGVLPHSGQLVWYMDYDAFLG

SEQ ID NO: 589 - protein, 261 aa, Homo sapiens
MAAACRSVKGLVAVITGGASGLGLATAERLVGQGASAVLLDLPNSGGEAQAKKLGNNCVFAPADVTSEKDVQTALALAKGKFGRVDVAVNCAGIAVASKTYNLKKGQTHTLEDFQRVLDVNLMGTFNVIRLVAGEMGQNEPDQGGQRGVIINTASVAAFEGQVGQAAYSASKGGIVGMTLPIARDLAPIGIRVMTIAPGLFGTPLLTSLPEKVCNFLASQVPFPSRLGDPAEYAHLVQAIIENPFLNGEVIRLDGAIRMQP

SEQ ID NO: 590 - protein, 4834 aa, Homo sapiens
MPSESFCLAAQARLDSKWLKTDIQLAFTRDGLCGLWNEMVKDGEIVYTGTESTQNGELPPRKDDSVEPSGTKKEDLNDKEKKDEEETPAPIYRAKSILDSWVWGKQPDVNELKECLSVLVKEQQALAVQSATTTLSALRLKQRLVILERYFIALNRTVFQENVKVKWKSSGISLPPVDKKSSRPAGKGVEGLARVGSRAALSFAFAFLRRAWRSGEDADLCSELLQESLDALRALPEASLFDESTVSSVWLEVVERATRFLRSVVTGDVHGTPATKGPGSIPLQDQHLALAILLELAVQRGTLSQMLSAILLLLQLWDSGAQETDNERSAQGTSAPLLPLLQRFQSIICRKDAPHSEGDMHLLSGPLSPNESFLRYLTLPQDNELAIDLRQTAVVVMAHLDRLATPCMPPLCSSPTSHKGSLQEVIGWGLIGWKYYANVIGPIQCEGLANLGVTQIACAEKRFLILSRNGRVYTQAYNSDTLAPQLVQGLASRNIVKIAAHSDGHHYLALAATGEVYSWGCGDGGRLGHGDTVPLEEPKVISAFSGKQAGKHVVHIACGSTYSAAITAEGELYTWGRGNYGRLGHGSSEDEAIPMLVAGLKGLKVIDVACGSGDAQTLAVTENGQVWSWGDGDYGKLGRGGSDGCKTPKLIEKLQDLDVVKVRCGSQFSIALTKDGQVYSWGKGDNQRLGHGTEEHVRYPKLLEGLQGKKVIDVAAGSTHCLALTEDSEVHSWGSNDQCQHFDTLRVTKPEPAALPGLDTKHIVGIACGPAQSFAWSSCSEWSIGLRVPFVVDICSMTFEQLDLLLRQVSEGMDGSADWPPPQEKECVAVATLNLLRLQLHAAISHQVDPEFLGLGLGSILLNSLKQTVVTLASSAGVLSTVQSAAQAVLQSGWSVLLPTAEERARALSALLPCAVSGNEVNISPGRRFMIDLLVGSLMADGGLESALHAAITAEIQDIEAKKEAQKEKEIDEQEANASTFHRSRTPLDKDLINTGICESSGKQCLPLVQLIQQLLRNIASQTVARLKDVARRISSCLDFEQHSRERSASLDWLLRFQRLLISKLYPGESIGQTSDISSPELMGVGSLLKKYTALLCTHIGDILPVAASIASTSWRHFAEVAYIVEGDFTGVLLPELVVSIVLLLSKNADLMQEAGAVPLLGGLLEHLDRFNHLAPGKERDDHEELAWPGIMESFFTGQNCRNNEEVTLIRKADLENHNKDGGFWTVIDGKVYDIKDFQTQSLTGNSILAQFAGEDPVVALEAALQFEDTRESMHAFCVGQYLEPDQEIVTIPDLGSLSSPLIDTERNLGLLLGLHASYLAMSTPLSPVEIECAKWLQSSIFSGGLQTSQIHYRYNEEKDEDHCSSPGGTPASKSRLCSHRRALGDHSQAFLQAIADNNIQDHNVKDFLCQIERYCRQCHLTTPIMFPPEHPVEEVGRLLLCCLLKHEDLGHVALSLVHAGALGIEQVKHRTLPKSVVDVCRVVYQAKCSLIKTHQEQGRSYKEVCAPVIERLRFLFNELRPAVCNDLSIMSKFKLLSSLPRWRRIAQKIIRERRKKRVPKKPESMDDEEKIGNEESDLEEACILPHSPINVDKRPIAIKSPKDKWQPLLSTVTGVHKYKWLKQNVQGLYPQSPLLSTIAEFALKEEPVDVEKMRKCLLKQLERAEVRLEGIDTILKLASKNFLLPSVQYAMFCGWQRLIPEGIDIGEPLTDCLKDVDLIPPFNRMLLEVTFGKLYAWAVQNIRNVLMDASATFKELGIQPVPLQTITNENPSGPSLGTIPQARFLLVMLSMLTLQHGANNLDLLLNSGMLALTQTALRLIGPSCDNVEEDMNASAQGASATVLEETRKETAPVQLPVSGPELAAMMKIGTRVMRGVDWKWGDQDGPPPGLGRVIGELGEDGWIRVQWDTGSTNSYRMGKEGKYDLKLAELPAAAQPSAEDSDTEDDSEAEQTERNIHPTAMMFTSTINLLQTLCLSAGVHAEIMQSEATKTLCGLLRMLVESGTTDKTSSPNRLVYREQHRSWCTLGFVRSIALTPQVCGALSSPQWITLLMKVVEGHAPFTATSLQRQILAVHLLQAVLPSWDKTERARDMKCLVEKLFDFLGSLLTTCSSDVPLLRESTLRRRRVRPQASLTATHSSTLAEEVVALLRTLHSLTQWNGLINKYINSQLRSITHSFVGRPSEGAQLEDYFPDSENPEVGGLMAVLAVIGGIDGRLRLGGQVMHDEFGEGTVTRITPKGKITVQFSDMRTCRVCPLNQLKPLPAVAFNVNNLPFTEPMLSVWAQLVNLAGSKLEKHKIKKSTKQAFAGQVDLDLLRCQQLKLYILKAGRALLSHQDKLRQILSQPAVQETGTVHTDDGAVVSPDLGDMSPEGPQPPMILLQQLLASATQPSPVKAIFDKQELEAAALAVCQCLAVESTHPSSPGFEDCSSSEATTPVAVQHIHPARVKRRKQSPVPALPIVVQLMEMGFSRRNIEFALKSLTGASGNASSLPGVEALVGWLLDHSDIQVTELSDADTVSDEYSDEEVVEDVDDAAYSMSTGAVVTESQTYKKRADFLSNDDYAVYVRENIQVGMMVRCCRAYEEVCEGDVGKVIKLDRDGLHDLNVQCDWQQKGGTYWVRYIHVELIGYPPPSSSSHIKIGDKVRVKASVTTPKYKWGSVTHQSVGVVKAFSANGKDIIVDFPQQSHWTGLLSEMELVPSIHPGVTCDGCQMFPINGSRFKCRNCDDFDFCETCFKTKKHNTRHTFGRINEPGQSAVFCGRSGKQLKRCHSSQPGMLLDSWSRMVKSLNVSSSVNQASRLIDGSEPCWQSSGSQGKHWIRLEIFPDVLVHRLKMIVDPADSSYMPSLVVVSGGNSLNNLIELKTININPSDTTVPLLNDYTEYHRYIEIAIKQCRSSGIDCKIHGLILLGRIRAEEEDLAAVPFLASDNEEEEDEKGNSGSLIRKKAAGLESAATIRTKVFVWGLNDKDQLGGLKGSKIKVPSFSETLSALNVVQVAGGSKSLFAVTVEGKVYACGEATNGRLGLGISSGTVPIPRQITALSSYVVKKVAVHSGGRHATALTVDGKVFSWGEGDDGKLGHFSRMNCDKPRLIEALKTKRIRDIACGSSHSAALTSSGELYTWGLGEYGRLGHGDNTTQLKPKMVKVLLGHRVIQVACGSRDAQTLALTDEGLVFSWGDGDFGKLGRGGSEGCNIPQNIERLNGQGVCQIECGAQFSLALTKSGVVWTWGKGDYFRLGHGSDVHVRKPQVVEGLRGKKIVHVAVGALHCLAVTDSGQVYAWGDNDHGQQGNGTTTVNRKPTLVQGLEGQKITRVACGSSHSVAWTTVDVATPSVHEPVLFQTARDPLGASYLGVPSDADSSAASNKISGASNSKPNRPSLAKILLSLDGNLAKQQALSHILTALQIMYARDAVVGALMPAAMIAPVECPSFSSAAPSDASAMASPMNGEECMLAVDIEDRLSPNPWQEKREIVSSEDAVTPSAVTPSAPSASARPFIPVTDDLGAASIIAETMTKTKEDVESQNKAAGPEPQALDEFTSLLIADDTRVVVDLLKLSVCSRAGDRGRDVLSAVLSGMGTAYPQVADMLLELCVTELEDVATDSQSGRLSSQPVVVESSHPYTDDTSTSGTVKIPGAEGLRVEFDRQCSTERRHDPLTVMDGVNRIVSVRSGREWSDWSSELRIPGDELKWKFISDGSVNGWGWRFTVYPIMPAAGPKELLSDRCVLSCPSMDLVTCLLDFRLNLASNRSIVPRLAASLAACAQLSALAASHRMWALQRLRKLLTTEFGQSININRLLGENDGETRALSFTGSALAALVKGLPEALQRQFEYEDPIVRGGKQLLHSPFFKVLVALACDLELDTLPCCAETHKWAWFRRYCMASRVAVALDKRTPLPRLFLDEVAKKIRELMADSENMDVLHESHDIFKREQDEQLVQWMNRRPDDWTLSAGGSGTIYGWGHNHRGQLGGIEGAKVKVPTPCEALATLRPVQLIGGEQTLFAVTADGKLYATGYGAGGRLGIGGTESVSTPTLLESIQHVFIKKVAVNSGGKHCLALSSEGEVYSWGEAEDGKLGHGNRSPCDRPRVIESLRGIEVVDVAAGGAHSACVTAAGDLYTWGKGRYGRLGHSDSEDQLKPKLVEALQGHRVVDIACGSGDAQTLCLTDDDTVWSWGDGDYGKLGRGGSDGCKVPMKIDSLTGLGVVKVECGSQFSVALTKSGAVYTWGKGDYHRLGHGSDDHVRRPRQVQGLQGKKVIAIATGSLHCVCCTEDGEVYTWGDNDEGQLGDGTTNAIQRPRLVAALQGKKVNRVACGSAHTLAWSTSKPASAGKLPAQVPMEYNHLQEIPIIALRNRLLLLHHLSELFCPCIPMFDLEGSLDETGLGPSVGFDTLRGILISQGKEAAFRKVVQATMVRDRQHGPVVELNRIQVKRSRSKGGLAGPDGTKSVFGQMCAKMSSFGPDSLLLPHRVWKVKFVGESVDDCGGGYSESIAEICEELQNGLTPLLIVTPNGRDESGANRDCYLLSPAARAPVHSSMFRFLGVLLGIAIRTGSPLSLNLAEPVWKQLAGMSLTIADLSEVDKDFIPGLMYIRDNEATSEEFEAMSLPFTVPSASGQDIQLSSKHTHITLDNRAEYVRLAINYRLHEFDEQVAAVREGMARVVPVPLLSLFTGYELETMVCGSPDIPLHLLKSVATYKGIEPSASLIQWFWEVMESFSNTERSLFLRFVWGRTRLPRTIADFRGRDFVIQVLDKYNPPDHFLPESYTCFFLLKLPRYSCKQVLEEKLKYAIHFCKSIDTDDYARIALTGEPAADDSSDDSDNEDVDSFASDSTQDYLTGH

SEQ ID NO: 591 - protein, 4834 aa, Homo sapiens; identical to SEQ ID NO: 590

SEQ ID NO: 592 - protein, 679 aa, Homo sapiens
MISASRAAAARLVGAAASRGPTAARHQDSWNGLSHEAFRLVSRRDYASEAIKGAVVGIDLGTTNSCVAVMEGKQAKVLENAEGARTTPSVVAFTADGERLVGMPAKRQAVTNPNNTFYATKRLIGRRYDDPEVQKDIKNVPFKIVRASNGDAWVEAHGKLYSPSQIGAFVLMKMKETAENYLGHTAKNAVITVPAYFNDSQRQATKDAGQISGLNVLRVINEPTAAALAYGLDKSEDKVIAVYDLGGGTFDISILEIQKGVFEVKSTNGDTFLGGEDFDQALLRHIVKEFKRETGVDLTKDNMALQRVREAAEKAKCELSSSVQTDINLPYLTMDSSGPKHLNMKLTRAQFEGIVTDLIRRTIAPCQKAMQDAEVSKSDIGEVILVGGMTRMPKVQQTVQDLFGRAPSKAVNPDEAVAIGAAIQGGVLAGDVTDVLLLDVTPLSLGIETLGGVFTKLINRNTTIPTKKSQVFSTAADGQTQVEIKVCQGEREMAGDNKLLGQFTLIGIPPAPRGVPQIEVTFDIDANGIVHVSAKDKGTRREQQIVIQSSGGLSKDDIENMVKNAEKYAEEDRRKKERVEAVNMAEGIIHDTETKMEEFKDQLPADECNKLKEEISKMRELLARKDSETGENIRQAASSLQQASLKLFEMAYKKMASEREGSGSSGTGEQKEDQKEEKQ

SEQ ID NO: 593 - protein, 393 aa, Homo sapiens
MALKVATVAGSAAKAVLGPALLCRPWEVLGAHEVPSRNIFSEQTIPPSAKYGGRHTVTMIPGDGIGPELMLHVKSVFRHACVPVDFEEVHVSSNADEEDIRNAIMAIRRNRVALKGNIETNHNLPPSHKSRNNILRTSLDLYANVIHCKSLPGVVTRHKDIDILIVRENTEGEYSSLEHESVAGVVESLKIITKAKSLRIAEYAFKLAQESGRKKVTAVHKANIMKLGDGLFLQCCREVAARYPQITFENMIVDNTTMQLVSRPQQFDVMVMPNLYGNIVNNVCAGLVGGPGLVAGANYGHVYAVFETATRNTGKSIANKNIANPTATLLASCMMLDHLKLHSYATSIRKAVLASMDNENMHTPDIGGQGTTSEAIQDVIRHIRVINGRAVEA

SEQ ID NO: 594 - protein, 671 aa, Homo sapiens
MRPMRIFVNDDRHVMAKHSSVYPTQEELEAVQNMVSHTERALKAVSDWIHEQEKGSSEQAESDNMDVPPEDDSKEGAGEQKTEHMTRTCRGVMRAGPGGQSASYSRGTWIWSWCCCVRRSPQPALLDKVADNLAIQLAAVTEDKYEILQSVDDAAIVIKNTKEPPLSLTIHLTSPVVREEMEKVLAGETLSVNDPPDVLDRQKCFAALASLRHAKWFQARANGLKSCVIVIRVLRDLCTRVPTWGPLRGWPLELLCEKSIGTANRPMGAGEALRRVLECLASGIVMPDGSGIYDPCEKEATDAIGHLDRQQREDITQSAQHALRLAAFGQLHKVLGMDPLPSKMPKKPKNENPVDYTVQIPPSTTYAITPMKRPMEEDGEEKSPSKKKKKIQKKEEKAEPPQAMNALMRLNQLKPGLQYKLVSQTGPVHAPIFTMSVEVDGNSFEASGPSKKTAKLHVAVKVLQDMGLPTGAEGRDSSKGEDSAEETEAKPAVVAPAPVVEAVSTPSAAFPSDATAENVKQQGPILTKHGKNPVMELNEKRRGLKYELISETGGSHDKRFVMEVEVDGQKFQGAGSNKKVAKAYAALAALEKLFPDTPLSPLMPTKRREPQYPSEGDRNLLLSHITLASAWEAPCTTKCPHPPTFEGGEEAGRSGDEGAGEDLVAPTMEAT

SEQ ID NO: 595 - protein, 756 aa, Homo sapiens
MLGICRGRRKFLAASLSLLCIPAITWIYLFSGSFEDGKPVSLSPLESQAHSPRYTASSQRERESLEVRMREVEEENRALRRQLSLAQGRAPSHRRGNHSKTYSMEEGTGDSENLRAGIVAGNSSECGQQPVVEKCETIHVAIVCAGYNASRDVVTLVKSVLFHRRNPLHFHLIADSIAEQILATLFQTWMVPAVRVDFYNADELKSEVSWIPNKHYSGIYGLMKLVLTKTLPANLERVIVLDTDITFATDIAELWAVFHKFKGQQVLGLVENQSDWYLGNLWKNHRPWPALGRGYNTGVILLLLDKLRKMKWEQMWRLTAERELMGMLSTSLADQDIFNAVIKQNPFLVYQLPCFWNVQLSDHTRSEQCYRDVSDLKVIHWNSPKKLRVKNKHVEFFRNLYLTFLEYDGNLLRRELFGCPSEADVNSENLQKQLSELDEDDLCYEFRRERFTVHRTHLYFLHYEYEPAADSTDVTLVAQLSMDRLQMLEAICKHWEGPISLALYLSDAEAQQFLRYAQGSEVLMSRHNVGYHIVYKEGQFYPVNLLRNVAMKHISTPYMFLSDIDFLPMYGLYEYLRKSVIQLDLANTKKAMIVPAFETLRYRLSFPKSKAELLSMLDMGTLFTFRYHVWTKGHAPTNFAKWRTATTPYRVEWEADFEPYVVVRRDCPEYDRRFVGFGWNKVAHIMELDVQEYEFIVLPNAYMIHMPHAPSFDITKFRSNKQYRICLKTLKEEFQQDMSRRYGFAALKYLTAENNS

SEQ ID NO: 596 - protein, 937 aa, Homo sapiens
MLAAAGGRVPTAAGAWLLRGQRTCDASPPWALWGRGPAIGGQWRGFWEASSRGGGAFSGGEDASEGGAEEGAGGAGGSAGAGEGPVITALTPMTIPDVFPHLPLIAITRNPVFPRFIKIIEVKNKKLVELLRRKVRLAQPYVGVFLKRDDSNESDVVESLDEIYHTGTFAQIHEMQDLGDKLRMIVMGHRRVHISRQLEVEPEEPEAENKHKPRRKSKRGKKEAEDELSARHPAELAMEPTPELPAEVLMVEVENVVHEDFQVTEEVKALTAEIVKTIRDIIALNPLYRESVLQMMQAGQRVVDNPIYLSDMGAALTGAESHELQDVLEETNIPKRLYKALSLLKKEFELSKLQQRLGREVEEKIKQTHRKYLLQEQLKIIKKELGLEKDDKDAIEEKFRERLKELVVPKHVMDVVDEELSKLGLLDNHSSEFNVTRNYLDWLTSIPWGKYSNENLDLARAQAVLEEDHYGMEDVKKRILEFIAVSQLRGSTQGKILCFYGPPGVGKTSIARSIARALNREYFRFSVGGMTDVAEIKGHRRTYVGAMPGKIIQCLKKTKTENPLILIDEVDKIGRGYQGDPSSALLELLDPEQNANFLDHYLDVPVDLSKVLFICTANVTDTIPEPLRDRMEMINVSGYVAQEKLAIAERYLVPQARALCGLDESKAKLSSDVLTLLIKQYCRESGVRNLQKQVEKVLRKSAYKIVSGEAESVEVTPENLQDFVGKPVFTVERMYDVTPPGVVMGLAWTAMGGSTLFVETSLRRPQDKDAKGDKDGSLEVTGQLGEVMKESARIAYTFARAFLMQHAPANDYLVTSHIHLHVPEGATPKDGPSAGCTIVTALLSLAMGRPVRQNLAMTGEVSLTGKILPVGGIKEKTIAAKRAGVTCIILPAENKKDFYDLAAFITEGLEVHFVEHYREIFDIAFPDEQAEALAVER

SEQ ID NO: 597 - protein, 152 aa, Homo sapiens
MAVLSKEYGFVLLTGAASFIMVAHLAINVSKARKKYKVEYPIMYSTDPENGHIFNCIQRAHQNTLEVYPPFLFFLAVGGVYHPRIASGLGLAWIVGRVLYAYGYYTGEPSKRSRGALGSIALLGLVGTTVCSAFQHLGWVKSGLGSGPKCCH

SEQ ID NO: 598 - protein, 2022 aa, Homo sapiens [sequence omitted]

SEQ ID NO: 599 - protein, 355 aa, Homo sapiens
MALRLLKLAATSASARVVAAGAQRVRGIHSSVQCKLRYGMWHFLLGDKASKRLTERSRVITVDGNICTGKGKLAKEIAEKLGFKHFPEAGIHYPDSTTGDGKPLATDYNGNCSLEKFYDDPRSNDGNSYRLQSWLYSSRLLQYSDALEHLLTTGQGVVLERSIFSDFVFLEAMYNQGFIRKQCVDHYNEVKSVTICDYLPPHLVIYIDVPVPEVQRRIQKKGDPHEMKITSAYLQDIENAYKKTFLPEMSEKCEVLQYSAREAQDSKKVVEDIEYLKFDKGPWLKQDNRTLYHLRLLVQDKFEVLNYTSIPIFLPEVTIGAHQTDRVLHQFRELPGRKYSPGYNTEVGDKWIWLK

SEQ ID NO: 600 - protein, 84 aa, Homo sapiens
MAARVGAFLKNAWDKEPVLVVSFVVGGLAVILPPLSPYFKYSVMINKATPYNYPVPVRDDGNMPDVPSHPQDPQGPSLEWLKKL

SEQ ID NO: 601 - protein, 172 aa, Homo sapiens
MPDSWDKDVYPEPPRRTPVQPNPIVYMMKAFDLIVDRPVTLVREFIERQHAKNRYYYYHRQYRRVPDITECKEEDIMCMYEAEMQWKRDYKVDQEIINIMQDRLKACQQREGQNYQQNCIKEVEQFTQVAKAYQDRYQDLGAYSSARKCLAKQRQRMLQERKAAKEAAAATS

SEQ ID NO: 602 - protein, 58 aa, Homo sapiens
MVNLLQIVRDHWVHVLVPMGFVIGCYLDRKSDERLTAFRNKSMLFKRELQPSEEVTWK

SEQ ID NO: 603 - protein, 105 aa, Homo sapiens
MSALTRLASFARVGGRLFRSGCARTAGDGGVRHAGGGVHIEPRYRQFPQLTRSQVFQSEFFSGLMWFWILWRFWHDSEEVLGHFPYPDPSQWTDEELGIPPDDED

SEQ ID NO: 604 - protein, 119 aa, Homo sapiens
MIARRNPEPLRFLPDEARSLPPPKLTDPRLLYIGFLGYCSGLIDNLIRRRPIATAGLHRQLLYITAFFFAGYYLVKREDYLYAVRDREMFGYMKLHPEDFPEEDKKTYGEIFEKFHPIR

SEQ ID NO: 605 - protein, 463 aa, Homo sapiens
MAALRALCGFRGVAAQVLRPGAGVRLPIQPSRGVRQWQPDVEWAQQFGGAVMYPSKETAHWKPPPWNDVDPPKDTIVKNITLNFGPQHPAAHGVLRLVMELSGEMVRKCDPHIGLLHRGTEKLIEYKTYLQALPYFDRLDYVSMMCNEQAYSLAVEKLLNIRPPPRAQWIRVLFGEITRLLNHIMAVTTHALDLGAMTPFFWLFEEREKMFEFYERVSGARMHAAYIRPGGVHQDLPLGLMDDIYQFSKNFSLRLDELEELLTNNRIWRNRTIDIGVVTAEEALNYGFSGVMLRGSGIQWDLRKTQPYDVYDQVEFDVPVGSRGDCYDRYLCRVEEMRQSLRIIAQCLNKMPPGEIKVDDAKVSPPKRAEMKTSMESLIHHFKLYTEGYQVPPGATYTAIEAPKGEFGVYLVSDGSSRPYRCKIKAPGFAHLAGLDKMSKGHMLADVVAIIGTQDIVFGEVDR

SEQ ID NO: 606 - protein, 264 aa, Homo sapiens
MAAAAVARLWWRGILGASALTRGTGRPSVLLLPVRRESAGADTRPTVRPRNDVAHKQLSAFGEYVAEILPKYVQQVQVSCFNELEVCIHPDGVIPVLTFLRDHTNAQFKSLVDLTAVDVPTRQNRFEIVYNLLSLRFNSRIRVKTYTDELTPIESAVSVFKAANWYEREIWDMFGVFFANHPDLRRILTDYGFEGHPFRKDFPLSGYVELRYDDEVKRVVAEPVELAQEFRKFDLNSPWEAFPVYRQPPESLKLEAGDKKPDAK

SEQ ID NO: 607 - protein, 106 aa, Homo sapiens
MPFLDIQKRFGLNIDRWLTIQSGEQPYKMAGRCHAFEKEWIECAHGIGYTRAEKECKIEYDDFVECLLRQKTMRRAGTIRKQRDKLIKEGKYTPPPHHIGKGEPRP

SEQ ID NO: 608 - protein, 124 aa, Homo sapiens
MAAAMTFCRLLNRCGEAARSLPLGARCFGVRVSPTGEKVTHTGQVYDDKDYRRIRFVGRQKEVNENFAIDLIAEQPVSEVETRVIACDGGGGALGHPKVYINLDKETKTGTCGYCGLQFRQHHH

SEQ ID NO: 609 - protein, 2003 aa, Homo sapiens
MQPPSLLLLLLLLLLLCVSVVRPRGLLCGSFPEPCANGGTCLSLSLGQGTCQCAPGFLGETCQFPDPCQNAQLCQNGGSCQALLPAPLGLPSSPSPLTPSFLCTCLPGFTGERCQAKLEDPCPPSFCSKRGRCHIQASGRPQCSCMPGWTGEQCQLRDFCSANPCVNGGVCLATYPQIQCHCPPGFEGHACERDVNECFQDPGPCPKGTSCHNTLGSFQCLCPVGQEGPRCELRAGPCPPRGCSNGGTCQLMPEKDSTFHLCLCPPGFIGPDCEVNPDNCVSHQCQNGGTCQDGLDTYTCLCPETWTGWDCSEDVDECETQGPPHCRNGGTCQNSAGSFHCVCVSGWGGTSCEENLDDCIAATCAPGSTCIDRVGSFSCLCPPGRTGLLCHLEDMCLSQPCHGDAQCSTNPLTGSTLCLCQPGYSGPTCHQDLDECLMAQQGPSPCEHGGSCLNTPGSFNCLCPPGYTGSRCEADHNECLSQPCHPGSTCLDLLATFHCLCPPGLEGQLCEVETNECASAPCLNHADCHDLLNGFQCICLPGFSGTRCEEDIDECRSSPCANGGQCQDQPGAFHCKCLPGFEGPRCQTEVDECLSDPCPVGASCLDLPGAFFCLCPSGFTGQLCEVPLCAPNLCQPKQICKDQKDKANCLCPDGSPGCAPPEDNCTCHHGHCQRSSCVCDVGWTGPECEAELGGCISAPCAHGGTCYPQPSGYNCTCPTGYTGPTCSEEMTACHSGPCLNGGSCNPSPGGYYCTCPPSHTGPQCQTSTDYCVSAPCFNGGTCVNRPGTFSCLCAMGFQGPRCEGKLRPSCADSPCRNRATCQDSPQGPRCLCPTGYTGGSCQTLMDLCAQKPCPRNSHCLQTGPSFHCLCLQGWTGPLCNLPLSSCQKAALSQGIDVSSLCHNGGLCVDSGPSYFCHCPPGFQGSLCQDHVNPCESRPCQNGATCMAQPSGYLCQCAPGYDGQNCSKELDACQSQPCHNHGTCTPKPGGFHCACPPGFVGLRCEGDVDECLDQPCHPTGTAACHSLANAFYCQCLPGHTGQWCEVEIDPCHSQPCFHGGTCEATAGSPLGFICHCPKGFEGPTCSHRAPSCGFHHCHHGGLCLPSPKPGFPPRCACLSGYGGPDCLTPPAPKGCGPPSPCLYNGSCSETTGLGGPGFRCSCPHSSPGPRCQKPGAKGCEGRSGDGACDAGCSGPGGNWDGGDCSLGVPDPWKGCPSHSRCWLLFRDGQCHPQCDSEECLFDGYDCETPPACTPAYDQYCHDHFHNGHCEKGCNTAECGWDGGDCRPEDGDPEWGPSLALLVVLSPPALDQQLFALARVLSLTLRVGLWVRKDRDGRDMVYPYPGARAEEKLGGTRDPTYQERAAPQTQPLGKETDSLSAGFVVVMGVDLSRCGPDHPASRCPWDPGLLLRFLAAMAAVGALEPLLPGPLLAVHPHAGTAPPANQLPWPVLCSPVAGVILLALGALLVLQLIRRRRREHGALWLPPGFTRRPRTQSAPHRRRPPLGEDSIGLKALKPKAEVDEDGVVMCSGPEEGEEVGQAEETGPPSTCQLWSLSGGCGALPQAAMLTPPQESEMEAPDLDTRGPDGVTPLMSAVCCGEVQSGTFQGAWLGCPEPWEPLLDGGACPQAHTVGTGETPLHLAARFSRPTAARRLLEAGANPNQPDRAGRTPLHAAVAADAREVCQLLLRSRQTAVDARTEDGTTPLMLAARLAVEDLVEELIAAQADVGARDKWGKTALHWAAAVNNARAARSLLQAGADKDAQDNREQTPLFLAAREGAVEVAQLLLGLGAARELRDQAGLAPADVAHQRNHWDLLTLLEGAGPPEARHKATPGREAGPFPRARTVSVSVPPHGGGALPRCRTLSAGAGPRGGGACLQARTWSVDLAARGGGAYSHCRSLSGVGAGGGPTPRGRRFSAGMRGPRPNPAIMRGRYGVAAGRGGRVSTDDWPCDWVALGACGSASNIPIPPPCLTPSPERGSPQLDCGPPALQEMPINQGGEGKK

SEQ ID NO: 610 - protein, 850 aa, Homo sapiens
MRQVCCSALPPPPLEKGRCSSYSDSSSSSSERSSSSSSSSSESGSSSRSSSNNSSISRPAAPPEPRPQQQPQPRSPAARRAAARSRAAAAGGMRRDPAPGFSMLLFGVSLACYSPSLKSVQDQAYKAPVVVEGKVQGLVPAGGSSSNSTREPPASGRVALVKVLDKWPLRSGGLQREQVISVGSCVPLERNQRYIFFLEPTEQPLVFKTAFAPLDTNGKNLKKEVGKILCTDCATRPKLKKMKSQTGQVGEKQSLKCEAAAGNPQPSYRWFKDGKELNRSRDIRIKYGNGRKNSRLQFNKVKVEDAGEYVCEAENILGKDTVRGRLYVNSVSTTLSSWSGHARKCNETAKSYCVNGGVCYYIEGINQLSCKCPNGFFGQRCLEKLPLRLYMPDPKQKAEELYQKRVLTITGICVALLVVGIVCVVAYCKTKKQRKQMHNHLRQNMCPAHQNRSLANGPSHPRLDPEEIQMADYISKNVPATDHVIRRETETTFSGSHSCSPSHHCSTATPTSSHRHESHTWSLERSESLTSDSQSGIMLSSVGTSKCNSPACVEARARRAAAYNLEERRRATAPPYHDSVDSLRDSPHSERYVSALTTPARLSPVDFHYSLATQVPTFEITSPNSAHAVSLPPAAPISYRLAEQQPLLRHPAPPGPGPGPGPGPGPGADMQRSYDSYYYPAAGPGPRRGTCALGGSLGSLPASPFRIPEDDEYETTQECAPPPPPRPRARGASRRTSAGPRRWRRSRLNGLAAQRARAARDSLSLSSGSGGGSASASDDDADDADGALAAESTPFLGLRGAHDALRSDSPPLCPAADSRTYYSLDSHSTRASSRHSRGPPPRAKQDSAPL

SEQ ID NO: 611 - protein, 551 aa, Homo sapiens
MAQFVQVLAEIGDFGRFQIQLLILLCVLNFLSPFYFFAHVFMVLDEPHHCAVAWVKNHTFNLSAAEQLVLSVPLDTAGHPEPCLMFRPPPANASLQDILSHRFNETQPCDMGWEYPENRLPSLKNEFNLVCDRKHLKDTTQSVFMGGLLVGTLMFGPLCDRIGRKATILAQLLLFTLIGLATAFVPSFELYMALRFAVATAVAGLSFSNVTLLTEWVGPSWRTQAVVLAQCNFSLGQMVLAGLAYGFRNWRLLQITGTAPGLLLFFYFWALPESARWLLTRGRMDEAIQLIQKAASVNRRKLSPELMNQLVPEKTGPSGNALDLFRHPQLRKVTLIIFCVWFVDSLGYYGLSLQVGDFGLDVYLTQLIFGAVEVPARCSSIFMMQRFGRKWSQLGTLVLGGLMCIIIIFIPADLPVVVTMLAVVGKMATAAAFTISYVYSAELFPTILRQTGMGLVGIFSRIGGILTPLVILLGEYHAALPMLIYGSLPIVAGLLCTLLPETHGQGLKDTLQDLELGPHPRSPKSVPSEKETEAKGRTSSPGVAFVSSTYF

SEQ ID NO: 612 - protein, 58 aa, Homo sapiens
MLQSIIKNIWIPMKPYYTKVYQEIWIGMGLMGFIVYKIRAADKRSKALKASAPAPGHH

SEQ ID NO: 613 - protein, 58 aa, Homo sapiens; identical to SEQ ID NO: 612

SEQ ID NO: 614 - protein, 216 aa, Homo sapiens
MAGRGGARRPNGPAAGNKICQFKLVLLGESAVGKSSLVLRFVKGQFHEYQESTIGAAFLTQTVCLDDTTVKFEIWDTAGQERYHSLAPMYYRGAQAAIVVYDITNTDTFARAKNWVKELQRQASPNIVIALAGNKADLASKRAVEFQEAQAYADDNSLLFMETSAKTAMNVNEIFMAIAKKLPKNEPQNATGAPGRNRGVDLQENNPASRSQCCSN

SEQ ID NO: 615 - protein, 301 aa, Homo sapiens
MAMLVLVPGRVMRPLGGQLWRFLPRGLEFWGPAEGTARVLLRQFCARQAEAWRASGRPGYCLGTRPLSTARPPPPWSQKGPGDSTRPSKPGPVSWKSLAITFAIGGALLAGMKHVKKEKAEKLEKERQRHIGKPLLGGPFSLTTHTGERKTDKDYLGQWLLIYFGFTHCPDVCPEELEKMIQVVDEIDSITTLPDLTPLFISIDPERDTKEAIANYVKEFSPKLVGLTGTREEVDQVARAYRVYYSPGPKDEDEDYIVDHTIIMYLIGPDGEFLDYFGQNKRKGEIAASIATHMRPYRKKS

SEQ ID NO: 616 - protein, 664 aa, Homo sapiens
MSGVRGLSRLLSARRLALAKAWPTVLQTGTRGFHFTVDGNKRASAKVSDSISAQYPVVDHEFDAVVVGAGGAGLRAAFGLSEAGFNTACVTKLFPTRSHTVAAQGGINAALGNMEEDNWRWHFYDTVKGSDWLGDQDAIHYMTEQAPAAVVELENYGMPFSRTEDGKIYQRAFGGQSLKFGKGGQAHRCCCVADRTGHSLLHTLYGRSLRYDTSYFVEYFALDLLMENGECRGVIALCIEDGSIHRIRAKNTVVATGGYGRTYFSCTSAHTSTGDGTAMITRAGLPCQDLEFVQFHPTGIYGAGCLITEGCRGEGGILINSQGERFMERYAPVAKDLASRDVVSRSMTLEIREGRGCGPEKDHVYLQLHHLPPEQLATRLPGISETAMIFAGVDVTKEPIPVLPTVHYNMGGIPTNYKGQVLRHVNGQDQIVPGLYACGEAACASVHGANRLGANSLLDLVVFGRACALSIEESCRPGDKVPPIKPNAGEESVMNLDKLRFADGSIRTSELRLSMQKSMQNHAAVFRVGSVLQEGCGKISKLYGDLKHLKTFDRGMVWNTDLVETLELQNLMLCALQTIYGAEARKESRGAHAREDYKVRIDEYDYSKPIQGQQKKPFEEHWRKHTLSFVDVGTGKVTLEYRPVIDKTLNEADCATIPPAIRSY

SEQ ID NO: 617 - protein, 664 aa, Homo sapiens; identical to SEQ ID NO: 616

SEQ ID NO: 618 - protein, 425 aa, Homo sapiens
MGEDAAQAEKFQHPGSDMRQEKPSSPSPMPSSTPSPSLNLGNTEEAIRDNSQVNAVTVLTLLDKLVNMLDAVQENQHKMEQRQISLEGSVKGIQNDLTKLSKYQASTSNTVSKLLEKSRKVSAHTRAVKERMDRQCAQVKRLENNHAQLLRRNHFKVLIFQEENEIPASVFVKQPVSGAVEGKEELPDENKSLEETLHTVDLSSDDDLPHDEEALEDSAEEKVEESRAEKIKRSSLKKVDSLKKAFSRQNIEKKMNKLGTKIVSVERREKIKKSLTSNHQKISSGKSSPFKVSPLTFGRKKVREGESHAENETKSEDLPSSEQMPNDQEEESFAEGHSEASLASALVEGEIAEEAAEKATSRGSNSGMDSNIDLTIVEDEEEESVALEQAQKVRYEGSYALTSEEAERSDGDPVQPAVLQVHQTS

SEQ ID NO: 619 - protein, 465 aa, Homo sapiens
MGGAVVDEGPTGVKAPDGGWGWAVLFGCFVITGFSYAFPKAVSVFFKELIQEFGIGYSDTAWISSILLAMLYGTGPLCSVCVNRFGCRPVMLVGGLFASLGMVAASFCRSIIQVYLTTGVITGLGLALNFQPSLIMLNRYFSKRRPMANGLAAAGSPVFLCALSPLGQLLQDRYGWRGGFLILGGLLLNCCVCAALMRPLVVTAQPGSGPPRPSRRLLDLSVFRDRGFVLYAVAASVMVLGLFVPPVFVVSYAKDLGVPDTKAAFLLTILGFIDIFARPAAGFVAGLGKVRPYSVYLFSFSMFFNGLADLAGSTAGDYGGLVVFCIFFGISYGMVGALQFEVLMAIVGTHKFSSAIGLVLLMEAVAVLVGPPSGGKLLDATHVYMYVFILAGAEVLTSSLILLLGNFFCIRKKPKEPQPEVAAAEEEKLHKPPADSGVDLREVEHFLKAEPEKNGEVVHTPETSV

SEQ ID NO: 620 - protein, 896 aa, Homo sapiens
MLRAALSLLALPLAGAAEEPTQKPESPGEPPPGLELFRWQWHEVEAPYLVALWILVASLAKIVFHLSRKVTSLVPESCLLILLGLVLGGIVLAVAKKAEYQLEPGTFFLFLLPPIVLDSGYFMPSRLFFDNLGAILTYAVVGTLWNAFTTGAALWGLQQAGLVAPRVQAGLLDFLLFGSLISAVDPVAVLAVFEEVHVNETLFIIVFGESLLNDAVTVVLYKVCNSFVEMGSANVQATDYLKGVASLFVVSLGGAAVGLVFAFLLALTTRFTKRVRIIEPLLVFLLAYAAYLTAEMASLSAILAVTMCGLGCKKYVEANISHKSRTTVKYTMKTLASCAETVIFMLLGISAVDSSKWAWDSGLVLGTLIFILFFRALGVVLQTWVLNQFRLVPLDKIDQVVMSYGGLRGAVAFALVILLDRTKVPAKDYFVATTIVVVFFTVIVQGLTIKPLVKWLKVKRSEHHKPTLNQELHEHTFDHILAAVEDVVGHHGYHYWRDRWEQFDKKYLSQLLMRRSAYRIRDQIWDVYYRLNIRDAISFVDQGGHVLSSTGLTLPSMPSRNSVAETSVTNLLRESGSGACLDLQVIDTVRSGRDREDAVMHHLLCGGLYKPRRRYKASCSRHFISEDAQERQDKEVFQQNMKRRLESFKSTKHNICFTKSKPRPRKTGRRKKDGVANAEATNGKHRGLGFQDTAAVILTVESEEEEEESDSSETEKEDDEGIIFVARATSEVLQEGKVSGSLEVCPSPRIIPPSPTCAEKELPWKSGQGDLAVYVSSETTKIVPVDMQTGWNQSISSLESLASPPCNQAPILTCLPPHPRGTEEPQVPLHLPSDPRSSFAFPPSLAKAGRSRSESSADLPQQQELQPLMGHKDHTHLSPGTATSHWCIQFNRGSRL

SEQ ID NO: 621 - protein, 1529 aa, Homo sapiens
MRGVGWQMLSLSLGLVLAILNKVAPQACPAQCSCSGSTVDCHGLALRSVPRNIPRNTERLDLNGNNITRITKTDFAGLRHLRVLQLMENKISTIERGAFQDLKELERLRLNRNHLQLFPELLFLGTAKLYRLDLSENQIQAIPRKAFRGAVDIKNLQLDYNQISCIEDGAFRALRDLEVLTLNNNNITRLSVASFNHMPKLRTFRLHSNNLYCDCHLAWLSDWLRQRPRVGLYTQCMGPSHLRGHNVAEVQKREFVCSGHQSFMAPSCSVLHCPAACTCSNNIVDCRGKGLTEIPTNLPETITEIRLEQNTIKVIPPGAFSPYKKLRRIDLSNNQISELAPDAFQGLRSLNSLVLYGNKITELPKSLFEGLFSLQLLLLNANKINCLRVDAFQDLHNLNLLSLYDNKLQTIAKGTFSPLRAIQTMHLAQNPFICDCHLKWLADYLHTNPIETSGARCTSPRRLANKRIGQIKSKKFRCSAKEQYFIPGTEDYRSKLSGDCFADLACPEKCRCEGTTVDCSNQKLNKIPEHIPQYTAELRLNNNEFTVLEATGIFKKLPQLRKINFSNNKITDIEEGAFEGASGVNEILLTSNRLENVQHKMFKGLESLKTLMLRSNRITCVGNDSFIGLSSVRLLSLYDNQITTVAPGAFDTLHSLSTLNLLANPFNCNCYLAWLGEWLRKKRIVTGNPRCQKPYFLKEIPIQDVAIQDFTCDDGNDDNSCSPLSRCPTECTCLDTVVRCSNKGLKVLPKGIPRDVTELYLDGNQFTLVPKELSNYKHLTLIDLSNNRISTLSNQSFSNMTQLLTLILSYNRLRCIPPRTFDGLKSLRLLSLHGNDISVVPEGAFNDLSALSHLAIGANPLYCDCNMQWLSDWVKSEYKEPGIARCAGPGEMADKLLLTTPSKKFTCQGPVDVNILAKCNPCLSNPCKNDGTCNSDPVDFYRCTCPYGFKGQDCDVPIHACISNPCKHGGTCHLKEGEEDGFWCICADGFEGENCEVNVDDCEDNDCENNSTCVDGINNYTCLCPPEYTGELCEEKLDFCAQDLNPCQHDSKCILTPKGFKCDCTPGYVGEHCDIDFDDCQDNKCKNGAHCTDAVNGYTCICPEGYSGLFCEFSPPMVLPRTSPCDNFDCQNGAQCIVRINEPICQCLPGYQGEKCEKLVSVNFINKESYLQIPSAKVRPQTNITLQIATDEDSGILLYKGDKDHIAVELYRGRVRASYDTGSHPASAIYSVETINDGNFHIVELLALDQSLSLSVDGGNPKIITNLSKQSTLNFDSPLYVGGMPGKSNVASLRQAPGQNGTSFHGCIRNLYINSELQDFQKVPMQTGILPGCEPCHKKVCAHGTCQPSSQAGFTCECQEGWMGPLCDQRTNDPCLGNKCVHGTCLPINAFSYSCKCLEGHGGVLCDEEEDLFNPCQAIKCKHGKCRLSGLGQPYCECSSGYTGDSCDREISCRGERIRDYYQKQQGYAACQTTKKVSRLECRGGCAGGQCCGPLRSKRRKYSFECTDGSSFVDEVEKVVKCGCTRCVS

SEQ ID NO: 622 - protein, 126 aa, Homo sapiens
MSIGVPIKVLHEAEGHIVTCETNTGEVYRGKLIEAEDNMNCQMSNITVTYRDGRVAQLEQVYIRGSKIRFLILPDMLKNAPMLKSMKNKNQGSGAGRGKAAILKAQVAARGRGRGMGRGNIFQKRR

SEQ ID NO: 623 - protein, 1142 aa, Homo sapiens
MTQLYKVALQWMVKSRVISELQEACWDMVSAMAGDIILLLDSDNDGIRTHAIKFVEGLIVTLSPRMADSEIPRRQEHDISLDRIPRDHPYIQYNVLWEEGKAALEQLLKFMVHPAISSINLTTALGSLANIARQRPMFMSEVIQAYETLHANLPPTLAKSQVSSVRKNLKLHLLSVLKHPASLEFQAQITTLLVDLGTPQAEIARNMPSSKDTRKRPRDDSDSTLKKMKLEPNLGEDDEDKDLEPGPSGTSKASAQISGQSDTDITAEFLQPLLTPDNVANLVLISMVYLPEAMPASFQAIYTPVESAGTEAQIKHLARLMATQMTAAGLGPGVEQTKQCKEEPKEEKVVKTESVLIKRRLSAQGQAISVVGSLSSMSPLEEEAPQAKRRPEPIIPVTQPRLAGAGGRKKIFRLSDVLKPLTDAQVEAMKLGAVKRILRAEKAVACSGAAQVRIKILASLVTQFNSGLKAEVLSFILEDVRARLDLAFAWLYQEYNAYLAAGASGSLDKYEDCLIRLLSGLQEKPDQKDGIFTKVVLEAPLITESALEVVRKYCEDESRTYLGMSTLRDLIFKRPSRQFQYLHVLLDLSSHEKDKVRSQALLFIKRMYEKEQLREYVEKFALNYLQLLVHPNPPSVLFGADKDTEVAAPWTEETVKQCLYLYLALLPQNHKLIHELAAVYTEAIADIKRTVLRVIEQPIRGMGMNSPELLLLVENCPKGAETLVTRCLHSLTDKVPPSPELVKRVRDLYHKRLPDVRFLIPVLNGLEKKEVIQALPKLIKLNPIVVKEVFNRLLGTQHGEGNSALSPLNPGELLIALHNIDSVKCDMKSIIKATNLCFAERNVYTSEVLAVVMQQLMEQSPLPMLLMRTVIQSLTMYPRLGGFVMNILSRLIMKQVWKYPKVWEGFIKCCQRTKPQSFQVILQLPPQQLGAVFDKCPELREPLLAHVRSFTPHQQAHIPNSIMTILEASGKQEPEAKEAPAGPLEEDDLEPLTLAPAPAPRPPQDLIGLRLAQEKALKRQLEEEQKLKPGGVGAPSSSSPSPSPSARPGPPPSEEAMDFREEGPECETPGIFISMDDDSGLTEAALLDSSLEGPLPKETAAGGLTLKEERSPQTLAPVGEDAMKTPSPAAEDAREPEAKGNS

SEQ ID NO: 624 - protein, 2265 aa, Homo sapiens
MVSIDLHQAGRVDSQASITQDSDSIKKPEEIKQCNDAPVSVLQEDIVGSLKSTPENHPETPKKKSDPELSKSEMKQSESRLAESKPNENRLVETKSSENKLETKVETQTEELKQNESRTTECKQNESTIVEPKQNENRLSDTKPNDNKQNNGRSETTKSRPETPKQKGESRPETPKQKSDGHPETPKQKGDGRPETPKQKGESRPETPKQKNEGRPETPKHRHDNRRDSGKPSTEKKPEVSKHKQDTKSDSPRLKSERAEALKQRPDGRSVSESLRRDHDNKQKSDDRGESERHRGDQSRVRRPETLRSSSRNEHGIKSDSSKTDKLERKHRHESGDSRERPSSGEQKSRPDSPRVKQGDSNKSRSDKLGFKSPTSKDDKRTEGNKSKVDTNKAHPDNKAEFPSYLLGGRSGALKNFVIPKIKRDKDGNVTQETKKMEMKGEPKDKVEKIGLVEDLNKGAKPVVVLQKLSLDDVQKLIKDREDKSRSSLKPIKNKPSKSNKGSIDQSVLKELPPELLAEIESTMPLCERVKMNKRKRSTVNEKPKYAEISSDEDNDSDEAFESSRKRHKKDDDKAWEYEERDRRSSGDHRRSGHSHEGRRSSGGGRYRNRSPSDSDMEDYSPPPSLSEVARKMKKKEKQKKRKAYEPKLTPEEMMDSSTFKRFTASIENILDNLEDMDFTAFGDDDEIPQELLLGKHQLNELGSESAKIKAMGIMDKLSTDKTVKVLNILEKNIQDGSKLSTLLNHNNDTEEEERLWRDLIMERVTKSADACLTTINIMTSPNMPKAVYIEDVIERVIQYTKFHLQNTLYPQYDPVYRLDPHGGGLLSSKAKRAKCSTHKQRVIVMLYNKVCDIVSSLSELLEIQLLTDTTILQVSSMGITPFFVENVSELQLCAIKLVTAVFSRYEKHRQLILEEIFTSLARLPTSKRSLRNFRLNSSDMDGEPMYIQMVTALVLQLIQCVVHLPSSEKDSNAEEDSNKKIDQDVVITNSYETAMRTAQNFLSIFLKKCGSKQGEEDYRPLFENFVQDLLSTVNKPEWPAAELLLSLLGRLLVHQFSNKSTEMALRVASLDYLGTVAARLRKDAVTSKMDQGSIERILKQVSGGEDEIQQLQKALLDYLDENTETDPSLVFSRKFYIAQWFRDTTLETEKAMKSQKDEESSEGTHHAKEIETTGQIMHRAENRKKFLRSIIKTTPSQFSTLKMNSDTVDYDDACLIVRYLASMRPFAQSFDIYLTQILRVLGENAIAVRTKAMKCLSEVVAVDPSILARLDMQRGVHGRLMDNSTSVREAAVELLGRFVLCRPQLAEQYYDMLIERILDTGISVRKRVIKILRDICIEQPTFPKITEMCVKMIRRVNDEEGIKKLVNETFQKLWFTPTPHNDKEAMTRKILNITDVVAACRDTGYDWFEQLLQNLLKSEEDSSYKPVKKACTQLVDNLVEHILKYEESLADSDNKGVNSGRLVACITTLFLFSKIRPQLMVKHAMTMQPYLTTKCSTQNDFMVICNVAKILELVVPLMEHPSETFLATIEEDLMKLIIKYGMTVVQHCVSCLGAVVNKVTQNFKFVWACFNRYYGAISKLKSQHQEDPNNTSLLTNKPALLRSLFTVGALCRHFDFDLEDFKGNSKVNIKDKVLELLMYFTKHSDEEVQTKAIIGLGFAFIQHPSLMFEQEVKNLYNNILSDKNSSVNLKIQVLKNLQTYLQEEDTRMQQADRDWKKVAKQEDLKEMGDVSSGMSSSIMQLYLKQVLEAFFHTQSSVRHFALNVIALTLNQGLIHPVQCVPYLIAMGTDPEPAMRNKADQQLVEIDKKYAGFIHMKAVAGMKMSYQVQQAINTCLKDPVRGFRQDESSSALCSHLYSMIRGNRQHRRAFLISLLNLFDDTAKTDVTMLLYIADNLACFPYQTQEEPLFIMHHIDITLSVSGSNLLQSFKESMVKDKRKERKSSPSKENESSDSEEEVSRPRKSRKRVDSDSDSDSEDDINSVMKCLPENSAPLIEFANVSQGILLLLMLKQHLKNLCGFSDSKIQKYSPSESAKVYDKAINRKTGVHFHPKQTLDFLRSDMANSKITEEVKRSIVKQYLDFKLLMEHLDPDEEEEEGEVSASTNARNKAITSLLGGGSPKNNTAAETEDDESDGEDRGGGTSGSLRRSKRNSDSTELAAQMNESVDVMDVIAICCPKYKDRPQIARVVQKTSSGFSVQWMAGSYSGSWTEAKRRDGRKLVPWVDTIKESDIIYKKIALTSANKLTNKVVQTLRSLYAAKDGTSS

SEQ ID NO: 625 - protein, 2243 aa, Homo sapiens
MDEEEDGAGAEESGQPRSFMRLNDLSGAGGRPGPGSAEKDPGSADSEAEGLPYPALAPVVFFYLSQDSRPRSWCLRTVCNPWFERISMLVILLNCVTLGMFRPCEDIACDSQRCRILQAFDDFIFAFFAVEMVVKMVALGIFGKKCYLGDTWNRLDFFIVIAGMLEYSLDLQNVSFSAVRTVRVLRPLRAINRVPSMRILVTLLLDTLPMLGNVLLLCFFVFFIFGIVGVQLWAGLLRNRCFLPENFSLPLSVDLERYYQTENEDESPFICSQPRENGMRSCRSVPTLRGDGGGGPPCGLDYEAYNSSSNTTCVNWNQYYTNCSAGEHNPFKGAINFDNIGYAWIAIFQVITLEGWVDIMYFVMDAHSFYNFIYFILLIIVGSFFMINLCLVVIATQFSETKQRESQLMREQRVRFLSNASTLASFSEPGSCYEELLKYLVYILRKAARRLAQVSRAAGVRVGLLSSPAPLGGQETQPSSSCSRSHRRLSVHHLVHHHHHHHHHYHLGNGTLRAPRASPEIQDRDANGSRRLMLPPPSTPALSGAPPGGAESVHSFYHADCHLEPVRCQAPPPRSPSEASGRTVGSGKVYPTVHTSPPPETLKEKALVEVAASSGPPTLTSLNIPPGPYSSMHKLLETQSTGACQSSCKISSPCLKADSGACGPDSCPYCARAGAGEVELADREMPDSDSEAVYEFTQDAQHSDLRDPHSRRQRSLGPDAEPSSVLAFWRLICDTFRKIVDSKYFGRGIMIAILVNTLSMGIEYHEQPEELTNALEISNIVFTSLFALEMLLKLLVYGPFGYIKNPYNIFDGVIVVISVWEIVGQQGGGLSVLRTFRLMRVLKLVRFLPALQRQLVVLMKTMDNVATFCMLLMLFIFIFSILGMHLFGCKFASERDGDTLPDRKNFDSLLWAIVTVFQILTQEDWNKVLYNGMASTSSWAALYFIALMTFGNYVLFNLLVAILVEGFQAEGDANKSESEPDFFSPSLDGDGDRKKCLALVSLGEHPELRKSLLPPLIIHTAATPMSLPKSTSTGLGEALGPASRRTSSSGSAEPGAAHEMKSPPSARSSPHSPWSAASSWTSRRSSRNSLGRAPSLKRRSPSGERRSLLSGEGQESQDEEESSEEERASPAGSDHRHRGSLEREAKSSFDLPDTLQVPGLHRTASGRGSASEHQDCNGKSASGRLARALRPDDPPLDGDDADDEGNLSKGERVRAWIRARLPACCLERDSWSAYIFPPQSRFRLLCHRIITHKMFDHVVLVIIFLNCITIAMERPKIDPHSAERIFLTLSNYIFTAVFLAEMTVKVVALGWCFGEQAYLRSSWNVLDGLLVLISVIDILVSMVSDSGTKILGMLRVLRLLRTLRPLRVISRAQGLKLVVETLMSSLKPIGNIVVICCAFFIIFGILGVQLFKGKFFVCQGEDTRNITNKSDCAEASYRWVRHKYNFDNLGQALMSLFVLASKDGWVDIMYDGLDAVGVDQQPIMNHNPWMLLYFISFLLIVAFFVLNMFVGVVVENFHKCRQHQEEEEARRREEKRLRRLEKKRRKAQCKPYYSDYSRFRLLVHHLCTSHYLDLFITGVIGLNVVTMAMEHYQQPQILDEALKICNYIFTVIFVLESVFKLVAFGFRRFFQDRWNQLDLAIVLLSIMGITLEEIEVNASLPINPTIIRIMRVLRIARVLKLLKMAVGMRALLDTVMQALPQVGNLGLLFMLLFFIFAALGVELFGDLECDETHPCEGLGRHATFRNFGMAFLTLFRVSTGDNWNGIMKDTLRDCDQESTCYNTVISPIYFVSFVLTAQFVLVNVVIAVLMKHLEESNKEAKEEAELEAELELEMKTLSPQPHSPLGSPFLWPGVEGPDSPDSPKPGALHPAAHARSASHFSLEHPTMQPHPTELPGPDLLTVRKSGVSRTHSLPNDSYMCRHGSTAEGPLGHRGWGLPKAQSGSVLSVHSQPADTSYILQLPKDAPHLLQPHSAPTWGTIPKLPPPGRSPLAQRPLRRQAAIRTDSLDVQGLGSREDLLAEVSGPSPPLARAYSFWGQSSTQAQQHSRSHSKISKHMTPPAPCPGPEPNWGKGPPETRSSLELDTELSWISGDLLPPGGQEEPPSPRDLKKCYSVEAQSCQRRPTSWLDEQRRHSIAVSCLDSGSQPHLGTDPSNLGGQPLGGPGSRPKKKLSPPSITIDPPESQGPRTPPSPGICLRRRAPSSDSKDPLASGPPDSMAASPSPKKDVLSLSGLSSDPADLDP

SEQ ID NO: 626 - protein, 323 aa, Homo sapiens
MASIWVGHRGTVRDYPDFSPSVDAEAIQKAIRGIGTDEKMLISILTERSNAQRQLIVKEYQAAYGKELKDDLKGDLSGHFEHLMVALVTPPAVFDAKQLKKSMKGAGTNEDALIEILTTRTSRQMKDISQAYYTVYKKSLGDDISSETSGDFRKALLTLADGRRDESLKVDEHLAKQDAQILYKAGENRWGTDEDKFTEILCLRSFPQLKLTFDEYRNISQKDIVDSIKGELSGHFEDLLLAIVNCVRNTPAFLAERLHRALKGIGTDEFTLNRIMVSRSEIDLLDIRTEFKKHYGYSLYSAIKSDTSGDYEITLLKICGGDD

SEQ ID NO: 627 - protein, 166 aa, Homo sapiens
MAATMFRATLRGWRTGVQRGCGLRLLSQTQGPPDYPRFVESVDEYQFVERLLPATRIPDPPKHEHYPTPSGWQPPRDPPPNLPYFVRRSRMHNIPVYKDITHGNRQMTVIRKVEGDIWALQKDVEDFLSPLLGKTPVTQVNEVTGTLRIKGYFDQELKAWLLEKGF

SEQ ID NO: 628 - protein, 166 aa, Homo sapiens; identical to SEQ ID NO: 627

SEQ ID NO: 629 - protein, 261 aa, Homo sapiens
MAESHLQSSLITASQFFEIWLHFDADGSGYLEGKELQNLIQELQQARKKAGLELSPEMKTFVDQYGQRDDGKIGIVELAHVLPTEENFLLLFRCQQLKSCEEFMKTWRKYDTDHSGFIETEELKNFLKDLLEKANKTVDDTKLAEYTDLMLKLFDSNNDGKLELTEMARLLPVQENFLLKFQGIKMCGKEFNKAFELYDQDGNGYIDENELDALLKDLCEKNKQDLDINNITTYKKNIMALSDGGKLYRTDLALILCAGDN

SEQ ID NO: 630 - protein, 348 aa, Homo sapiens
MASREDELRNCVVCGDQATGYHFNALTCEGCKGFFRRTVSKSIGPTCPFAGSCEVSKTQRRHCPACRLQKCLDAGMRKDMILSAEALALRRAKQAQRRAQQTPVQLSKEQEELIRTLLGAHTRHMGTMFEQFVQFRPPAHLFIHHQPLPTLAPVLPLVTHFADINTFMVLQVIKFTKDLPVFRSLPIEDQISLLKGAAVEICHIVLNTTFCLQTQNFLCGPLRYTIEDGARVGFQVEFLELLFHFHGTLRKLQLQEPEYVLLAAMALFSPDRPGVTQRDEIDQLQEEMALTLQSYIKGQQRRPRDRFLYAKLLGLLAELRSINEAYGYQIQHIQGLSAMMPLLQEICS

SEQ ID NO: 631 - protein, 348 aa, Homo sapiens; identical to SEQ ID NO: 630

SEQ ID NO: 632 - protein, 605 aa, Homo sapiens
MALRKGGLALALLLLSWVALGPRSLEGADPGTPGEAEGPACPAACVCSYDDDADELSVFCSSRNLTRLPDGVPGGTQALWLDGNNLSSVPPAAFQNLSSLGFLNLQGGQLGSLEPQALLGLENLCHLHLERNQLRSLALGTFAHTPALASLGLSNNRLSRLEDGLFEGLGSLWDLNLGWNSLAVLPDAAFRGLGSLRELVLAGNRLAYLQPALFSGLAELRELDLSRNALRAIKANVFVQLPRLQKLYLDRNLIAAVAPGAFLGLKALRWLDLSHNRVAGLLEDTFPGLLGLRVLRLSHNAIASLRPRTFKDLHFLEELQLGHNRIRQLAERSFEGLGQLEVLTLDHNQLQEVKAGAFLGLTNVAVMNLSGNCLRNLPEQVFRGLGKLHSLHLEGSCLGRIRPHTFTGLSGLRRLFLKDNGLVGIEEQSLWGLAELLELDLTSNQLTHLPHRLFQGLGKLEYLLLSRNRLAELPADALGPLQRAFWLDVSHNRLEALPNSLLAPLGRLRYLSLRNNSLRTFTPQPPGLERLWLEGNPWDCGCPLKALRDFALQNPSAVPRFVQAICEGDDCQPPAYTYNNITCASPPEVVGLDLRDLSEAHFAPC

SEQ ID NO: 633 - protein, 116 aa, Homo sapiens
MAGVLKKTTGLVGLAVCNTPHERLRILYTKILDVLEEIPKNAAYRKYTEQITNEKLAMVKAEPDVKKLEDQLQGGQLEEVILQAEHELNLARKMREWKLWEPLVEEPPADQWKWPI

SEQ ID NO: 634 - protein, 118 aa, Homo sapiens
MRGRKMASATRLIQRLRNWASGHDLQGKLQLRYQEISKRTQPPPKLPVGPSHKLSNNYYCTRDGRRESVPPSIIMSSQKALVSGKPAESSAVAATEKKAVTPAPPIKRWELSSDQPYL

SEQ ID NO: 635 - protein, 156 aa, Homo sapiens
MASRVLSAYVSRLPAAFAPLPRVRMLAVARPLSTALCSAGTQTRLGTLQPALVLAQVPGRVTQLCRQYSDMPPLTLEGIQDRVLYVLKLYDKIDPEKLSVNSHFMKDLGLDSLDQVEIIMAMEDEFGFEIPDIDAEKLMCPQEIVDYIADKKDVYE

SEQ ID NO: 636 - protein, 727 aa, Homo sapiens
MLRIPVRRALVGLSKSPKGCVRTTATAASNLIEVFVDGQSVMVEPGTTVLQACEKVGMQIPRFCYHERLSVAGNCRMCLVEIEKAPKVVAACAMPVMKGWNILTNSEKSKKAREGVMEFLLANHPLDCPICDQGGECDLQDQSMMFGNDRSRFLEGKRAVEDKNIGPLVKTIMTRCIQCTRCIRFASEIAGVDDLGTTGRGNDMQVGTYIEKMFMSELSGNIIDICPVGALTSKPYAFTARPWETRKTESIDVMDAVGSNIVVSTRTGEVMRILPRMHEDINEEWISDKTRFAYDGLKRQRLTEPMVRNEKGLLTYTSWEDALSRVAGMLQSFQGKDVAAIAGGLVDAEALVALKDLLNRVDSDTLCTEEVFPTAGAGTDLRSNYLLNTTIAGVEEADVVLLVGTNPRFEAPLFNAWIRKSWLHNDLKVALIGSPVDLTYTYDHLGDSPKILQDIASGSHPFSQVLKEAKKPMVVLGSSALQRNDGAAILAAVSSIAQKIRMTSGVTGDWKVMNILHRIASQVAALDLGYKPGVEAIRKNPPKVLFLLGADGGCITRQDLPKDCFIIYQGHHGDVGAPIADVILPGAAYTEKSATYVNTEGRAQQTKVAVTPPGLAREDWKIIRALSEIAGMTLPYDTLDQVRNRLEEFSPNLVRYDDIEGANYFQQANELSKLVNQQLLADPLVPPQLTLKDFYMTDSISRASQTMAKCVKAVTEGAQAVEEPSIC

SEQ ID NO: 637 - protein, 140 aa, Homo sapiens
MAGWNAYIDNLMADGTCQDAAIVGYKDSPSVWAAVPGKTFVNITPAEVGVLVGKDRSSFYVNGLTLGGQKCSVIRDSLLQDGEFSMDLRTKSTGGAPTFNVTVTKTDKTLVLLMGKEGVHGGLINKKCYEMASHLRRSQY

SEQ ID NO: 638 - protein, 1012 aa, Homo sapiens
MAEAALEAVRSELREFPAAARELCVPLAVPYLDKPPTPLHFYRDWVCPNRPCIIRNALQHWPALQKWSLPYFRATVGSTEVSVAVTPDGYADAVRGDRFMMPAERRLPLSFVLDVLEGRAQHPGVLYVQKQCSNLPSELPQLLPDLESHVPWASEALGKMPDAVNFWLGEAAAVTSLHKDHYENLYCVVSGEKHFLFHPPSDRPFIPYELYTPATYQLTEEGTFKVVDEEAMEKAEVSRTCLLTVRVLQAHRLPSKDLVTPSDCYVTLWLPTACSHRLQTRTVKNSSSPVWNQSFHFRIHRQLKNVMELKVFDQDLVTGDDPVLSVLFDAGTLRAGEFRRESFSLSPQGEGRLEVEFRLQSLADRGEWLVSNGVLVARELSCLHVQLEETGDQKSSEHRVQLVVPGSCEGPQEASVGTGTFRFHCPACWEQELSIRLQDAPEEQLKAPLSALPSGQVVRLVFPTSQEPLMRVELKKEAGLRELAVRLGFGPCAEEQAFLSRRKQVVAAALRQALQLDGDLQEDEIPVVAIMATGGGIRAMTSLYGQLAGLKELGLLDCVSYITGASGSTWALANLYEDPEWSQKDLAGPTELLKTQVTKNKLGVLAPSQLQRYRQELAERARLGYPSCFTNLWALINEALLHDEPHDHKLSDQREALSHGQNPLPIYCALNTKGQSLTTFEFGEWCEFSPYEVGFPKYGAFIPSELFGSEFFMGQLMKRLPESRICFLEGIWSNLYAANLQDSLYWASEPSQFWDRWVRNQANLDKEQVPLLKIEEPPSTAGRIAEFFTDLLTWRPLAQATHNFLRGLHFHKDYFQHPHFSTWKATTLDGLPNQLTPSEPHLCLLDVGYLINTSCLPLLQPTRDVDLILSLDYNLHGAFQQLQLLGRFCQEQGIPFPPISPSPEEQLQPRECHTFSDPTCPGAPAVLHFPLVSDSFREYSAPGVRRTPEEAAAGEVNLSSSDSPYHYTKVTYSQEDVDKLLHLTHYNVCNNQEQLLEALRQAVQRRRQRRPH

SEQ ID NO: 639 - protein, 253 aa, Homo sapiens
MARSLLLPLQILLLSLALETAGEEAQGDKIIDGAPCARGSHPWQVALLSGNQLHCGGVLVNERWVLTAAHCKMNEYTVHLGSDTLGDRRAQRIKASKSFRHPGYSTQTHVNDLMLVKLNSQARLSSMVKKVRLPSRCEPPGTTCTVSGWGTTTSPDVTFPSDLMCVDVKLISPQDCTKVYKDLLENSMLCAGIPDSKKNACNGDSGGPLVCRGTLQGLVSWGTFPCGQPNDPGVYTQVCKFTKWINDTMKKHR

SEQ ID NO: 640 - protein, 630 aa, Homo sapiens
MAELCPLAEELSCSICLEPFKEPVTTPCGHNFCGSCLNETWAVQGSPYLCPQCRAVYQARPQLHKNTVLCNVVEQFLQADLAREPPADVWTPPARASAPSPNAQVACDHCLKEAAVKTCLVCMASFCQEHLQPHFDSPAFQDHPLQPPVRDLLRRKCSQHNRLREFFCPEHSECICHICLVEHKTCSPASLSQASADLEATLRHKLTVMYSQINGASRALDDVRNRQQDVRMTANRKVEQLQQEYTEMKALLDASETTSTRKIKEEEKRVNSKFDTIYQILLKKKSEIQTLKEEIEQSLTKRDEFEFLEKASKLRGISTKPVYIPEVELNHKLIKGIHQSTIDLKNELKQCIGRLQELTPSSGDPGEHDPASTHKSTRPVKKVSKEEKKSKKPPPVPALPSKLPTFGAPEQLVDLKQAGLEAAAKATSSHPNSTSLKAKVLETFLAKSRPELLEYYIKVILDYNTAHNKVALSECYTVASVAEMPQNYRPHPQRFTYCSQVLGLHCYKKGIHYWEVELQKNNFCGVGICYGSMNRQGPESRLGRNSASWCVEWFNTKISAWHNNVEKTLPSTKATRVGVLLNCDHGFVIFFAVADKVHLMYKFRVDFTEALYPAFWVFSAGATLSICSPK

SEQ ID NO: 641 - protein, 342 aa, Homo sapiens
MAAGTAVGAWVLVLSLWGAVVGAQNITARIGEPLVLKCKGAPKKPPQRLEWKLGGGPWDSVARVLPNGSLFLPAVGIQDEGIFRCQAMNRNGKETKSNYRVRVYQIPGKPEIVDSASELTAGVPNKVGTCVSEGSYPAGTLSWHLDGKPLVPNEKGVSVKEQTRRHPETGLFTLQSELMVTPARGGDPRPTFSCSFSPGLPRHRALRTAPIQPRVWEPVPLEEVQLVVEPEGGAVAPGGTVTLTCEVPAQPSPQIHWMKDVSDLERGAGRTRRGGANCRLCGRIRAGNSSPGPGDPGRPGDSRPAHWGHLVAKAATPRRGEEGPRKPGGRGGACRTESVGGT

SEQ ID NO: 642 - protein, 558 aa, Homo sapiens
MYRYLGEALLLSRAGPAALGSASADSAALLGWARGQPAAAPQPGLALAARRHYSEAVADREDDPNFFKMVEGFFDRGASIVEDKLVEDLRTRESEEQKRNRVRGILRIIKPCNHVLSLSFPIRRDDGSWEVIEGYRAQHSQHRTPCKGGIRYSTDVSVDEVKALASLMTYKCAVVDVPFGGAKAGVKINPKNYTDNELEKITRRFTMELAKKGFIGPGIDVPAPDMSTGEREMSWIADTYASTIGHYDINAHACVTGKPISQGGIHGRISATGRGVFHGIENFINEASYMSILGMTPGFGDKTFVVQGFGNVGLHSMRYLHRFGAKCIAVGESDGSIWNPDGIDPKELEDFKLQHGSILGFPKAKPYEGSILEADCDILIPAASEKQLTKSNAPRVKAKIIAEGANGPTTPEADKIFLERNIMVIPDLYLNAGGVTVSYFEWLKNLNHVSYGRLTFKYERDSNYHLLMSVQESLERKFGKHGGTIPIVPTAEFQDRISGASEKDIVHSGLAYTMERSARQIMRTAMKYNLGLDLRTAAYVNAIEKVFKVYNEAGVTFT

SEQ ID NO: 643 - protein, 346 aa, Homo sapiens
MDTGPDQSYFSGNHWFVFSVYLLTFLVGLPLNLLALVVFVGKLRCRPVAVDVLLLNLTASDLLLLLFLPFRMVEAANGMHWPLPFILCPLSGFIFFTTIYLTALFLAAVSIERFLSVAHPLWYKTRPRLGQAGLVSVACWLLASAHCSVVYVIEFSGDISHSQGTNGTCYLEFWKDQLAILLPVRLEMAVVLFVVPLIITSYCYSRLVWILGRGGSHRRQRRVAGLVAATLLNFLVCFGPYNVSHVVGYICGESPVWRIYVTLLSTLNSCVDPFVYYFSSSGFQADFHELLRRLCGLWGQWQQESSMELKEQKGGEEQRADRPAERKTSEHSQGCGTGGQVACAEN

SEQ ID NO: 644 - protein, 260 aa, Homo sapiens [sequence omitted]

SEQ ID NO: 645 - protein, 260 aa, Homo sapiens [sequence omitted]

SEQ ID NO: 646 - protein, 268 aa, Homo sapiens
MGLSPSAPAVAVQASNASASPPSGCPMHEGKMKGCPVNTEPSGPTCEKKTYSVPAHQERAYEYVECPIRGTAAENKENLDPSNLMPPPNQTPAPDQPFALSTVREESSIPRADSEKKWVYPSEQMFWNAMLKKGWKWKDEDISQKDMYNIIRIHNQNNEQAWKEILKWEALHAAECPCGPSLIRFGGKAKEYSPRARIRSWMGYELPFDRHDWIINRCGTEVRYVIDYYDGGEVNKDYQFTILDVRPALDSLSAVWDRMKVAWWRWTS

SEQ ID NO: 647 - protein, 435 aa, Homo sapiens
MAPFGRNLLKTRHKNRSPTKDMDSEEKEIVVWVCQEEKFVCGLTKRTTSADVIQALLEEHEATFGEKRFLLGKPSDYCIIEKWRGSERVLPPLTRILKLWKAWGDEQPNMQFVLVKADAFLPVPLWRTAEAKLVQNTEKLWELSPANYMKTLPPDKQKRIVRKTFRKLAKIKQDTVSHDRDNMETLVHLIISQDHTIHQQVKRMKELDLEIEKCEAKFHLDRVENDGENYVQDAYLMPSFSEVEQNLDLQYEENQTLEDLSESDGIEQLEERLKYYRILIDKLSAEIEKEVKSVCIDINEDAEGEAASELESSNLESVKCDLEKSMKAGLKIHSHLSGIQKEIKYSDSLLQMKAKEYELLAKEFNSLHISNKDGCQLKENRAKESEVPSSNGEIPPFTQRVFSNYTNDTDSDTGISSNHSQDSETTVGDVVLLST

SEQ ID NO: 648 - protein, 264 aa, Homo sapiens
MCPWRPRLGRRCMVSPREADLGPQKDTRLDLPRSPARAPREQNSLGEVDRRGPREQTRAPATAAPPRPLGSRGAEAAEPQEGLSATVSACFQEQQEMNTLQGPVSFKDVAVDFTQEEWRQLDPDEKIAYGDVMLENYSHLVSVGYDYHQAKHHHGVEVKEVEQGEEPWIMEGEFPCQHSPEPAKAIKPIDRKSVHQICSGPVVLSLSTAVKELVENSLDAGATNIDLKLKDYGVDLIEVSDNGCGVEEENFEGLISFSSETSHM

SEQ ID NO: 649 - protein, 319 aa, Homo sapiens [sequence omitted]

SEQ ID NO: 650 - protein, 851 aa, Homo sapiens
MAQWEMLQNLDSPFQDQLHQLYSHSLLPVDIRQYLAVWIEDQNWQEAALGSDDSKATMLFFHFLDQLNYECGRCSQDPESLLLQHNLRKFCRDIQPFSQDPTQLAEMIFNLLLEEKRILIQAQRAQLEQGEPVLETPVESQQHEIESRILDLRAMMEKLVKSISQLKDQQDVFCFRYKIQAKGKTPSLDPHQTKEQKILQETLNELDKRRKEVLDASKALLGRLTTLIELLLPKLEEWKAQQQKACIRAPIDHGLEQLETWFTAGAKLLFHLRQLLKELKGLSCLVSYQDDPLTKGVDLRNAQVTELLQRLLHRAFVVETQPCMPQTPHRPLILKTGSKFTVRTRLLVRLQEGNESLTVEVSIDRNPPQLQGFRKFNILTSNQKTLTPEKGQSQGLIWDFGYLTLVEQRSGGSGKGSNKGPLGVTEELHIISFTVKYTYQGLKQELKTDTLPVVIISNMNQLSIAWASVLWFNLLSPNLQNQQFFSNPPKAPWSLLGPALSWQFSSYVGRGLNSDQLSMLRNKLFGQNCRTEDPLLSWADFTKRESPPGKLPFWTWLDKILELVHDHLKDLWNDGRIMGFVSRSQERRLLKKTMSGTFLLRFSESSEGGITCSWVEHQDDDKVLIYSVQPYTKEVLQSLPLTEIIRHYQLLTEENIPENPLRFLYPRIPRDEAFGCYYQEKVNLQERRKYLKHRLIVVSNRQVDELQQPLELKPEPELESLELELGLVPEPELSLDLEPLLKAGLDLGPELESVLESTLEPVIEPTLCMVSQTVPEPDQGPVSQPVPEPDLPCDLRHLNTEPMEIFRNCVKIEEIMPNGDPLLAGQNTVDEVYVSRPSHFYTDGPLMPSDF

SEQ ID NO: 651 - protein, 193 aa, Homo sapiens
MDGGTLPRSAPPAPPVPVGCAARRRPASPELLRCSRRRRPATAETGGGAAAVARRNERERNRVKLVNLGFQALRQHVPHGGASKKLSKVETLRSAVEYIRALQRLLAEHDAVRNALAGGLRPQAVRPSAPRGPPGTTPVAASPSRASSSPGRGGSSEPGSPRSAYSSDDSGCEGALSPAERELLDFSSWLGGY

SEQ ID NO: 652 - protein, 117 aa, Homo sapiens
RRGSGCSPSADQQGAQDREEEAAAAPAPTSRGHRTEKRKRLQLQCQPAGGTGQRRGSGSSPSADQQRAQDREEEAAAAPAPTSSGHRTEKRKRQQPQRRPAAGTGQKRGSEEMEEEG

SEQ ID NO: 653 - protein, 179 aa, Homo sapiens [sequence omitted]

SEQ ID NO: 654 - protein, 892 aa, Homo sapiens
GGDEQVRDAAAVPAGLPRLEGGDKTLREPGAGAQEVTLKVHISDASTHQPVADALIEIFTNQASIASGTSGTDGVAFIKFQYKLGSQLIVTASKHAYVPNSAPWKPIRLPVFSSLSLGLLPERSATLMVYEDVVQIVSGFQGARPQPRVHFQRRALRLPENTSYSDLTAFLTAASSPSEVDSFPYLRGLDGNGTGNSTRHDLTPVTAVSVHLLSSNGTPVLVDGPIYVTVPLATQSSLRHNAYVAAWRFDQKLGTWLKSGLGLVHQEGSQLTWTYIAPQLGYWVAAMSPPIPGPVVTQDITTYHTVFLLAILGGMAFILLVLLCLLLYYCRRKCLKPRQHHRKLQLPAGLESSKRDQSTSMSHINLLFSRRASEFPGPLSVTSHGRPEAPGTKELMSGVHLEMMSPGGEGDLHTPMLKLSYSTSQEFSSREELLSCKEEDKSQISFDNLTPSGTLGKDYHKSVEVFSLKARKSMEREGYESSGMMTTGVVTTPCSHSLYLKSRTEKVQPPREANSPFRNICTPRLHHLRKNSCWTADPLNVMMSRSVDHLERPTSFPRPGQLICCSSVDQVNDSVYRKVLPALVIPAHYMKLPGDHSYVSQPLVVPADQQLEIERLQAELSNPHAGIFPHPSSQIQPQPLSSQAISQQHLQDAGTREWSPQNASMSESLSIPASLNDAALAQMNSEVQLLTEKALMELGGGKPLPHTRAWFVSLDGRSNAHVRHSYIDLQRAGRNGSNDASLDSGVDMNEPKSARKGRGDALSLQQNYPPVQEHQQKEPRAPDSTAYTQLVYLDDVEQSGSECGTTVCTPEDSALRCLLEGSSRRSGGQLPSLQEETTRRTADAPSEPAASPHQRRSAHEEEEDDDDDDQGEDKKSPWQKREERPLMAFNIK

SEQ ID NO: 655 - protein, 205 aa, Homo sapiens
MAAGESMAQRMVWVDLEMTGLDIEKDQIIEMACLITDSDLNILAEGPNLIIKQPDELLDSMSDWCKEHHGKSGLTKAVKESTITLQQAEYEFLSFVRQQTPPGLCPLAGNSVHEDKKFLDKYMPQFMKHLHYRIIDVSTVKELCRRWYPEEYEFAPKKAASHRALDDISESIKELQFYRNNIFKKKIDEKKRKIIENGENEKTVS

SEQ ID NO: 656 - protein, 412 aa, Homo sapiens
MILASVLRSGPGGGLPLRPLLGPALALRARSTSATDTHHVEMARERSKTVTSFYNQSAIDAAAEKPSVRLTPTMMLYAGRSQDGSHLLKSARYLQQELPVRIAHRIKGFRCLPFIIGCNPTILHVHELYIRAFQKLTDFPPIKDQADEAQYCQLVRQLLDDHKDVVTLLAEGLRESRKHIEDEKLVRYFLDKTLTSRLGIRMLATHHLALHEDKPDFFGIICTRLSPKKIIEKWVDFARRLCEHKYGNAPRVRINGHVAARFPFIPMPLDYILPELLKNAMRATMESHLDTPYNVPDVVITIANNDVDLIIRISDRGGGIAHKDLDRVMDYHFTTAEASTQDPRISPLFGHLDMHSGAQSGPMHGFGFGLPTSRAYAEYLGGSLQLQSLQGIGTDVYLRLRHIDGREESFRI

SEQ ID NO: 657 - protein, 478 aa, Homo sapiens
MGRCCFYTAGTLSLLLLVTSVTLLVARVFQKAVDQSIEKKIVLRNGTEAFDSWEKPPLPVYTQFYFFNVTNPEEILRGETPRVEEVGPYTYRELRNKANIQFGDNGTTISAVSNKAYVFERDQSVGDPKIDLIRTLNIPVLTVIEWSQVHFLREIIEAMLKAYQQKLFVTHTVDELLWGYKDEILSLIHVFRPDISPYFGLFYEKNGTNDGDYVFLTGEDSYLNFTKIVEWNGKTSLDWWITDKCNMINGTDGDSFHPLITKDEVLYVFPSDFCRSVYITFSDYESVQGLPAFRYKVPAEILANTSDNAGFCIPEGNCLGSGVLNVSICKNGAPIIMSFPHFYQADERFVSAIEGMHPNQEDHETFVDINPLTGIILKAAKRFQINIYVKKLDDFVETGDIRTMVFPVMYLNESVHIDKETASRLKSMINTTLIITNIPYIIMALGVFFGLVFTWLACKGQGSMDEGTADERAPLIRT

SEQ ID NO: 658 - protein, 268 aa, Homo sapiens
MAAVRALVASRLAAASAFTSLSPGGRTPSQRAALHLSVPRPAARVALVLSGCGVYDGTEIHEASAILVHLSRGGAEVQIFAPDVPQMHVIDHTKGQPSEGESRNVLTESARIARGKITDLANLSAANHDAAIFPGGFGAAKNLSTFAVDGKDCKVNKEVERVLKEFHQAGKPIGLCCIAPVLAAKVLRGVEVTVGHEQEEGGKWPYAGTAEAIKALGAKHCVKEVVEAHVDQKNKVVTTPAFMCETALHYIHDGIGAMVRKVLELTGK

SEQ ID NO: 659 - protein, 662 aa, Homo sapiens
MRPQILLLLALLTLGLAAQHQDKVPCKMVDKKVSCQVLGLLQVPSVLPPDTETLDLSGNQLRSILASPLGFYTALRHLDLSTNEISFLQPGAFQALTHLEHLSLAHNRLAMATALSAGGLGPLPRVTSLDLSGNSLYSGLLERLLGEAPSLHTLSLAENSLTRLTRHTFRDMPALEQLDLHSNVLMDIEDGAFEGLPRLTHLNLSRNSLTCISDFSLQQLRVLDLSCNSIEAFQTASQPQAEFQLTWLDLRENKLLHFPDLAALPRLIYLNLSNNLIRLPTGPPQDSKGIHAPSEGWSALPLSAPSGNASGRPLSQLLNLDLSYNEIELIPDSFLEHLTSLCFLNLSRNCLRTFEARRLGSLPCLMLLDLSHNALETLELGARALGSLRTLLLQGNALRDLPPYTFANLASLQRLNLQGNRVSPCGGPDEPGPSGCVAFSGITSLRSLSLVDNEIELLRAGAFLHTPLTELDLSSNPGLEVATGALGGLEASLEVLALQGNGLMVLQVDLPCFICLKRLNLAENRLSHLPAWTQAVSLEVLDLRNNSFSLLPGSAMGGLETSLRRLYLQGNPLSCCGNGWLAAQLHQGRVDVDATQDLICRFSSQEEVSLSHVRPEDCEKGGLKNINLIIILTFILVSAILLTTLAACCCVRRQKFNQQYKA

SEQ ID NO: 660 - protein, 366 aa, Homo sapiens
MAGPAWISKVSRLLGAFHNPKQVTRGFTGGVQTVTLIPGDGIGPEISAAVMKIFDAAKAPIQWEERNVTAIQGPGGKWMIPSEAKESMDKNKMGLKGPLKTPIAAGHPSMNLLLRKTFDLYANVRPCVSIEGYKTPYTDVNIVTIRENTEGEYSGIEHVIVDGVVQSIKLITEGASKRIAEFAFEYARNNHRSNVTAVHKANIMRMSDGLFLQKCREVAESCKDIKFNEMYLDTVCLNMVQDPSQFDVLVMPNLYGDILSDLCAGLIGGLGVTPSGNIGANGVAIFESVHGTAPDIAGKDMANPTALLLSAVMMLRHMGLFDHAARIEAACFATIKDGKSLTKDLGGNAKCSDFTEEICRRVKDLD

SEQ ID NO: 661 - protein, 366 aa, Homo sapiens; identical to SEQ ID NO: 660

SEQ ID NO: 662 - protein, 572 aa, Homo sapiens
METPSQRRATRSGAQASSTPLSPTRITRLQEKEDLQELNDRLAVYIDRVRSLETENAGLRLRITESEEVVSREVSGIKAAYEAELGDARKTLDSVAKERARLQLELSKVREEFKELKARNTKKEGDLIAAQARLKDLEALLNSKEAALSTALSEKRTLEGELHDLRGQVAKLEAALGEAKKQLQDEMLRRVDAENRLQTMKEELDFQKNIYSEELRETKRRHETRLVEIDNGKQREFESRLADALQELRAQHEDQVEQYKKELEKTYSAKLDNARQSAERNSNLVGAAHEELQQSRIRIDSLSAQLSQLQKQLAAKEAKLRDLEDSLARERDTSRRLLAEKEREMAEMRARMQQQLDEYQELLDIKLALDMEIHAYRKLLEGEEERLRLSPSPTSQRSRGRASSHSSQTQGGGSVTKKRKLESTESRSSFSQHARTSGRVAVEEVDEEGKFVRLRNKSNEDQSMGNWQIKRQNGDDPLLTYRFPPKFTLKAGQVVTIWAAGAGATHSPPTDLVWKAQNTWGCGNSLRTALINSTGEEVAMRKLVRSVTVVEDDEDEDGDDLLHHHHVSGSRR

SEQ ID NO: 663 - protein, 1025 aa, Homo sapiens
MEPFTNDRLQLPRNMIENSMFEEEPDVVDLAKEPCLHPLEPDEVEYEPRGSRLLVRGLGEHEMEEDEEDYESSAKLLGMSFMNRSSGLRNSATGYRQSPDGACSVPSARTMVVCAFVIVVAVSVIMVIYLLPRCTFTKEGCHKKNQSIGLIQPFATNGKLFPWAQIRLPTAVVPLRYELSLHPNLTSMTFRGSVTISVQALQVTWNIILHSTGHNISRVTFMSAVSSQEKQAEILEYAYHGQIAIVAPEALLAGHNYTLKIEYSANISSSYYGFYGFSYTDESNEKKYFAATQFEPLAARSAFPCFDEPAFKATFIIKIIRDEQYTALSNMPKKSSVVLDDGLVQDEFSESVKMSTYLVAFIVGEMKNLSQDVNGTLVSIYAVPENIGQVHYALETTVKLLEFFQNYFEIQYPLKKLDLVAIPDFEAGAMENWGLLTFREETLLYDSNTSSMADRKLVTKIIAHELAHQWFGNLVTMKWWNDLWLNEGFATFMEYFSLEKIFKELSSYEDFLDARFKTMKKDSLNSSHPISSSVQSSEQIEEMFDSLSYFKGSSLLLMLKTYLSEDVFQHAVVLYLHNHSYASIQSDDLWDSFNEVTNQTLDVKRMMKTWTLQKGFPLVTVQKKGKELFIQQERFFLNMKPEIQPSDTSYLWHIPLSYVTEGRNYSKYQSVSLLDKKSGVINLTEEVLWVKVNINMNGYYIVHYADDDWEALIHQLKINPYVLSDKDRANLINNIFELAGLGKVPLKRAFDLINYLGNENHTAPITEALFQTDLIYNLLEKLGYMDLASRLVTRVFKLLQNQIQQQTWTDEGTPSMRELRSALLEFACTHNLGNCSTTAMKLFDDWMASNGTQSLPTDVMTTVFKVGAKTDKGWSFLLGKYISIGSEAEKNKILEALASSEDVRKLYWLMKSSLNGDNFRTQKLSFIIRTVGRHFPGHLLAWDFVKENWNKLVQKFPLGSYTIQNIVAGSTYLFSTKTHLSEVQAFFENQSEATFRLRCVQEALEVIQLNIQWMEKNLKSLTWWL

SEQ ID NO: 664 - protein, 133 aa, Homo sapiens
MMLNSDTMELDLPPTHSETESGFSDCGGGAGPDGAGPGGPGGGQARGPEPGEPGRKDLQHLSREERRRRRRATAKYRTAHATRERIRVEAFNLAFAELRKLLPTLPPDKKLSKIEILRLAICYISYLNHVLDV

SEQ ID NO: 665 - protein, 207 aa, Homo sapiens
MLALRCGSRWLGLLSVPRSVPLRLPAARACSKGSGDPSSSSSSGNPLVYLDVDANGKPLGRVVLELKADVVPKTAENFRALCTGEKGFGYKGSTFHRVIPSFMCQAGDFTNHNGTGGKSIYGSRFPDENFTLKHVGPGVLSMANAGPNTNGSQFFICTIKTDWLDGKHVVFGHVKEGMDVVKKIESFGSKSGRTSKKIVITDCGQLS

SEQ ID NO: 666 - protein, 1318 aa, Homo sapiens
MLIFSVRDMFAKMSILGVRSFGIEDKDKQIITFFSPLTILVGPNGAGKTTIIECLKYICTGDFPPGTKGNTFVHDPKVAQETDVRAQIRLQFRDVNGELIAVQRSMVCTQKSKKTEFKTLEGVITRTKHGEKVSLSSKCAEIDREMISSLGVSKAVLNNVIFCHQEDSNWPLSEGKALKQKFDEIFSATRYIKALETLRQVRQTQGQKVEEYQMELKYLKQYKEKACEIRDQITSKEAQLTSSKEIVKSYENELDPLKNRLKEIEHNLSKIMKLDNEIKALDSRKKQMEKDNSELEEKMEKVFQGTDEQLNDLYHNHQRTVREKERKLVDCHRELEKLNKESRLLNQEKSELLVEQGRLQLQADRHQEHIRARDSLIQSLATQLELDGFERGPFSERQIKNFHKLVRERQEGEAKTANQLMNDFAEKETLKQKQIDEIRDKKTGLGRIIELKSEILSKKQNELKNVKYELQQLEGSSDRILELDQELIKAERELSKAEKNSNVETLKMEVISLQNEKADLDRTLRKLDQEMEQLNHHTTTRTQMEMLTKDKADKDEQIRKIKSRHSDELTSLLGYFPNKKQLEDWLHSKSKEINQTRDRLAKLNKELASSEQNKNHINNELERKEEQLSSYEDKLFDVCGSQDFESDLDRLKEEIEKSSKQRAMLAGATAVYSQFITQLTDENQSCCPVCQRVFQTEAELQEAISDLQSKLRLAPDKLKSTESELKKKEKRRDEMLGLAPMRQSIIDLKEKEIPELRNKLQNVNRDIQRLKNDIEEQETLLGTIMPEEESAKVCLTDVTIMERFQMELKDVERKIAQQAAKLQGIDLDRTVQQVNQEKQEKQHKLDTVSSKIELNRKLIQDQQEQIQHLKSTTNELKSEKLQISTNLQRRQQLEEQTVELSTEVQSLYREIKDAKEQVSPLETTLEKFQQEKEELINKKNTSNKIAQDKLNDIKEKVKNIHGYMKDIENHIQDGKDDYMKQKETELNKVIAQLSECEKHKEKINEDMRLMRQDIDTQKIQERWLQDNLTLRKRNEELKEVEEEGKQHLKEMGQMQVLQMKSEHQKLEENIDNIKRNHNLALGRQKGYEEEIIHFKKELREPQFRDAEEKYREMMIVMRTTELVNKDLDIYYKTLDQAIMKFHSMKMEEINKIIRDLWRSTYRGQDIEYIEIRSDADENVSASDKRRNYNYRVVMLKGDTALDMRGRCSAGQKVLASLIIRLALAETFCLNCGIIALDEPTTNLDRENIESLAHALVEIIKSRSQQRNFQLLVITHDEDFVELLGRSEYVEKFYRIKKNIDQCSEIVKCSVSSLGFNVH

SEQ ID NO: 667 - protein, 151 aa, Homo sapiens [sequence omitted]

SEQ ID NO: 668 - protein, 643 aa, Homo sapiens
MGLLPKLGVSQGSDTSTSRAGRCARSVFGNIKVFVLCQGLLQLCQLLYSAYFKSSLTTIEKRFGLSSSSSGLISSLNEISNAILIIFVSYFGSRVHRPRLIGIGGLFLAAGAFILTLPHFLSEPYQYTLASTGNNSRLQAELCQKHWQDLPPSKCHSTTQNPQKETSSMWGLMVVAQLLAGIGTVPIQPFGISYVDDFSEPSNSPLYISILFAISVFGPAFGYLLGSIMLQIFVDYGRVNTAAVNLVPGDPRWIGAWWLGLLISSALLVLTSFPFFFFPRAMPIGAKRAPATADEARKLEEAKSRGSLVDFIKRFPCIFLRLLMNSLFVLVVLAQCTFSSVIAGLSTFLNKFLEKQYGTSAAYANFLIGAVNLPAAALGMLFGGILMKRFVFSLQTIPRIATTIITISMILCVPLFFMGCSTPTVAEVYPPSTSSSIHPQSPACRRDCSCPDSIFHPVCGDNGIEYLSPCHAGCSNINMSSATSKQLIYLNCSCVTGGSASAKTGSCPVPCAHFLLPAIFLISFVSLIACISHNPLYMMVLRVVNQEEKSFAIGVQFLLMRLLAWLPSPALYGLTIDHSCIRWNSLCLGRRGACAYYDNDALRDRYLGLQMGYKALGMLLLCFISWRVKKNKEYNVQKAAGLI

SEQ ID NO: 669 - protein, 172 aa, Homo sapiens
MEEYAREPCPWRIVDDCGGAFTMGVIGGGVFQAIKGFRNAPVGIRHRLRGSANAVRIRAPQIGGSFAVWGGLFSTIDCGLVRLRGKEDPWNSITSGALTGAVLAARSGPLAMVGSAMMGGILLALIEGVGILLTRYTAQQFRNAPPFLEDPSQLPPKDGTPAPGYPSYQQYH

SEQ ID NO: 670 - protein, 137 aa, Homo sapiens
MSSLIRRVISTAKAPGAIGPYSQAVLVDRTIYISGQIGMDPSSGQLVSGGVAEEAKQALKNMGEILKAAGCDFTNVVKTTVLLADINDFNTVNEIYKQYFKSNFPARAAYQVAALPKGSRIEIEAVAIQGPLTTASL

SEQ ID NO: 671 - protein, 1417 aa, Homo sapiens
MLGTGPAAATTAATTSSNVSVLQQFASGLKSRNEETRAKAAKELQHYVTMELREMSQEESTRFYDQLNHHIFELVSSSDANERKGGILAIASLIGVEGGNATRIGRFANYLRNLLPSNDPVVMEMASKAIGRLAMAGDTFTAEYVEFEVKRALEWLGADRNEGRRHAAVLVLRELAISVPTFFFQQVQPFFDNIFVAVWDPKQAIREGAVAALRACLILTTQREPKEMQKPQWYRHTFEEAEKGFDETLAKEKGMNRDDRIHGALLILNELVRISSMEGERLREEMEEITQQQLVHDKYCKDLMGFGTKPRHITPFTSFQAVQPQQSNALVGLLGYSSHQGLMGFGTSPSPAKSTLVESRCCRDLMEEKFDQVCQWVLKCRNSKNSLIQMTILNLLPRLAAFRPSAFTDTQYLQDTMNHVLSCVKKEKERTAAFQALGLLSVAVRSEFKVYLPRVLDIIRAALPPKDFAHKRQKAMQVDATVFTCISMLARAMGPGIQQDIKELLEPMLAVGLSPALTAVLYDLSRQIPQLKKDIQDGLLKMLSLVLMHKPLRHPGMPKGLAHQLASPGLTTLPEASDVGSITLALRTLGSFEFEGHSLTQFVRHCADHFLNSEHKEIRMEAARTCSRLLTPSIHLISGHAHVVSQTAVQVVADVLSKLLVVGITDPDPDIRYCVLASLDERFDAHLAQAENLQALFVALNDQVFEIRELAICTVGRLSSMNPAFVMPFLRKMLIQILTELEHSGIGRIKEQSARMLGHLVSNAPRLIRPYMEPILKALILKLKDPDPDPNPGVINNVLATIGELAQVSGLEMRKWVDELFIIIMDMLQDSSLLAKRQVALWTLGQLVASTGYVVEPYRKYPTLLEVLLNFLKTEQNQGTRREAIRVLGLLGALDPYKHKVNIGMIDQSRDASAVSLSESKSSQDSSDYSTSEMLVNMGNLPLDEFYPAVSMVALMRIFRDQSLSHHHTMVVQAITFIFKSLGLKCVQFLPQVMPTFLNVIRVCDGAIREFLFQQLGMLVSFVKSHIRPYMDEIVTLMREFWVMNTSIQSTIILLIEQIVVALGGEFKLYLPQLIPHMLRVFMHDNSPGRIVSIKLLAAIQLFGANLDDYLHLLLPPIVKLFDAPEAPLPSRKAALETVDRLTESLDFTDYASRIIHPIVRTLDQSPELRSTAMDTLSSLVFQLGKKYQIFIPMVNKVLVRHRINHQRYDVLICRIVKGYTLADEEEDPLIYQHRMLRSGQGDALASGPVETGPMKKLHVSTINLQKAWGAARRVSKDDWLEWLRRLSLELLKDSSSPSLRSCWALAQAYNPMARDLFNAAFVSCWSELNEDQQDELIRSIELALTSQDIAEVTQTLLNLAEFMEHSDKGPLPLRDDNGIVLLGERAAKCRAYAKALHYKELEFQKGPTPAILESLI

SEQ ID NO: 672 - protein, 182 aa, Homo sapiens
MARLLWLLRGLTLGTAPRRAVRGQAGGGGPGTGPGLGEAGSLATCELPLAKSEWQKKLTPEQFYVTREKGTEPPFSGIYLNNKEAGMYHCVCCDSPLFSSEKKYCSGTGWPSFSEAHGTSGSDESHTGILRRLDTSLGSARTEVVCKQCEAHLGHVFPDGPGPNGQRFCINSVALKFKPRKH

SEQ ID NO: 673 - protein, 294 aa, Homo sapiens
MATHGQTCARPMCIPPSYADLGKAARDIFNKGFGFGLVKLDVKTKSCSGVEFSTSGSSNTDTGKVTGTLETKYKWCEYGLTFTEKWNTDNTLGTEIAIEDQICQGLKLTFDTTFSPNTGKKSGKIKSSYKRECINLGCDVDFDFAGPAIHGSAVFGYEGWLAGYQMTFDSAKSKLTRNNFAVGYRTGDFQLHTNVNDGTEFGGSIYQKVCEDLDTSVNLAWTSGTNCTRFGIAAKYQLDPTASISAKVNNSSLIGVGYTQTLRPGVKLTLSALVDGKSINAGGHKVGLALELEA

SEQ ID NO: 674 - protein, 263 aa, Homo sapiens [sequence omitted]

SEQ ID NO: 675 - protein, 334 aa, Homo sapiens
MSEPIRVLVTGAAGQIAYSLLYSIGNGSVFGKDQPIILVLLDITPMMGVLDGVLMELQDCALPLLKDVIATDKEDVAFKDLDVAILVGSMPRREGMERKDLLKANVKIFKSQGAALDKYAKKSVKVIVVGNPANTNCLTASKSAPSIPKENFSCLTRLDHNRAKAQIALKLGVTANDVKNVIIWGNHSSTQYPDVNHAKVKLQGKEVGVYEALKDDSWLKGEFVTTVQQRGAAVIKARKLSSAMSAAKAICDHVRDIWFGTPEGEFVSMGVISDGNSYGVPDDLLYSFPVVIKNKTWKFVEGLPINDFSREKMDLTAKELTEEKESAFEFLSSA

SEQ ID NO: 676 - protein, 334 aa, Homo sapiens; identical to SEQ ID NO: 675

SEQ ID NO: 677 - protein, 338 aa, Homo sapiens [sequence omitted]

SEQ ID NO: 678 - protein, 398 aa, Homo sapiens
MDIRKFFGAISSGKKPVNETVKKNEKTKPSEGTVKGKKGVKEAKVNNPCKEDASRPKQHNKKKRIIYDSDSESEETVQVKNAKKKSEKLPVSCKPGKISRKDPVTYISETDEDDDFLCKKAASKSKENGVSTNSYLGASNVKKNEENTKTKSKPLSPIKLTPTSVLDYFGTESVQRSGKKMVASKKKESSQTPDDSRLNDEAIAKQLQLDEDAELERQLHEDEEFARTLALLDEEPKTKKARKDSEEGESFSPAKAELSKAAKQKSPANEHFSIGRKTYSPAKYGKGRGSEGTKQPCRSAHQKEACSSLKASSKLALMKAQEENSYKETELLAAKRESAIEPKGEKTTPRKTKGSPTKRESVSPEDSEKNRTNYQSLSKLLKSRRSQSPGLQRNTQGS

SEQ ID NO: 679 - protein, 541 aa, Homo sapiens
MKFLIFAFFGGVHLLSLCSGKAICKNGISKRTFEEIKEEIASCGDVAKAIINLAVYGKAQNRSYERLALLVDTVGPRLSGSKNLEKAIQIMYQNLQQDGLEKVHLEPVRIPHWERGEESAVMLEPRIHKIAILGLGSSIGTPPEGITAEVLVVTSFDELQRRASEARGKIVVYNQPYINYSRTVQYRTQGAVEAAKVGALASLIRSVASFSIYSPHTGIQEYQDGVPKIPTACITVEDAEMMSRMASHGIKIVIQLKMGAKTYPDTDSFNTVAEITGSKYPEQVVLVSGHLDSWDVGQGAMDDGGGAFISWEALSLIKDLGLRPKRTLRLVLWTAEEQGGVGAFQYYQLHKVNISNYSLVMESDAGTFLPTGLQFTGSEKARAIMEEVMSLLQPLNITQVLSHGEGTDINFWIQAGVPGASLLDDLYKYFFFHHSHGDTMTVMDPSRWMLLLLFGLLFLMLLQTWKKCCLGPRNSKKETFSCFWPGILGLQLWKTPLHITISSNSSSKHNSISCFLLLSFLILSKFSDSRKRNHSPLPPTT

SEQ ID NO: 680 - protein, 444 aa, Homo sapiens
MREIVHLQAGQCGNQIGAKFWEVISDEHGIDPTGTYHGDSDLQLERINVYYNEATGGNYVPRAVLVDLEPGTMDSVRSGPFGQIFRPDNFVFGQSGAGNNWAKGHYTEGAELVDAVLDVVRKEAESCDCLQGFQLTHSLGGGTGSGMGTLLISKMREEFPDRIMNTFSVVPSPKVSDTVVEPYNATLSVHQLVENTDETYCIDNEALYDICFRTLKLTTPTYGDLNHLVSATMSGVTTCLRFPGQLNADLRKLAVNMVPFPRLHFFMPAFAPLTSRGSQQYRGLTVPELTQQMFDAKNMMAACDPRHGRYLTVAAVFRGRMSMKEVDEQMLSVQSKNSSYFVEWIPNNVKTAVCDIPPRGLKMAVTFIGNSTAIQELFKRISEQFTAMFRRKAFLHWYTGEGMDEMEFTEAESNMNDLVSEYQQYQDATAEQGEFEEEAEEEVA

SEQ ID NO: 681 - protein, 274 aa, Homo sapiens
MLSVAARSGPFAPVLSATSRGVAGALRPLVQATVPATPEQPVLDLKRPFLSRESLSGQAVRRPLVASVGLNVPASVCYSHTDIKVPDFSEYRRLEVLDSTKSSRESSEARKGFSYLVTGVTTVGVAYAAKNAVTQFVSSMSASADVLALAKIEIKLSDIPEGKNMAFKWRGKPLFVRHRTQKEIEQEAAVELSQLRDPQHDLDRVKKPEWVILIGVCTHLGCVPIANAGDFGGYYCPCHGSHYDASGRIRLGPAPLNLEVPTYEFTSDDMVIVG

SEQ ID NO: 682 - protein, 427 aa, Homo sapiens
ANVTYSTTWSEAQQYLMDNPTFAEDEELQNMDKEDALICFEEHIRALEKEEEEEKQKSLLRERRRQRKNRESFQIFLDELHEHGQLHSMSSWMELYPTISSDIRFTNMLGQPGSTALDLFKFYVEDLKARYHDEKKIIKDILKDKGFVVEVNTTFEDFVAIISSTKRSTTLDAGNIKLAFNSLLEKAEAREREREKEEARKMKRKESAFKSMLKQAAPPIELDAVWEDIRERFVKEPAFEDITLESERKRIFKDFMHVLEHECQHHHSKNKKHSKKSKKHHRKRSRSRSGSDSDDDDSHSKKKRQRSESRSASEHSSSAESERSYKKSKKHKKKSKKRRHKSDSPESDAEREKDKKEKDRESEKDRTRQRSESKHKSPKKKTGKDSGNWDTSGSELSEGELEKRRRTLLEHWMMINKLYQIYVYSMI

SEQ ID NO: 683 - protein, 271 aa, Homo sapiens
MEALPLLAATTPDHGRHRRLLLLPLLLFLLPAGAVQGWETEERPRTREEECHFYAGGQVYPGEASRVSVADHSLHLSKAKISKPAPYWEGTAVIDGEFKELKLTDYRGKYLVFFFYPLDFTFVCPTEIIAFGDRLEEFRSINTEVVACSVDSQFTHLAWINTPRRQGGLGPIRIPLLSDLTHQISKDYGVYLEDSGHTLRGLFIIDDKGILRQITLNDLPVGRSVDETLRLVQAFQYTDKHGEVCPAGWKPGSETIIPDPAGKLKYFDKLN

SEQ ID NO: 684 - protein, 161 aa, Homo sapiens
MAGRKLALKTIDWVAFAEIIPQNQKAIASSLKSWNETLTSRLAALPENPPAIDWAYYKANVAKAGLVDDFEKKFNALKVPVPEDKYTAQVDAEEKEDVKSCAEWVSLSKARIVEYEKEMEKMKNLIPFDQMTIEDLNEAFPETKLDKKKYPYWPHQPIENL

SEQ ID NO: 685 - protein, 839 aa, Homo sapiens
MGWVGGRRRDSASPPGRSRSAADDINPAPANMEGGGGSVAVAGLGARGSGAAAATVRELLQDGCYSDFLNEDFDVKTYTSQSIHQAVIAEQLAKLAQGISQLDRELHLQVVVRHEDLLAQATGIESLEGVLQMMQTRIGALQGAVDRIKAKIVEPYNKIVARTAQLARLQVACDLLRRIIRILNLSKRLQGQLQGGSREITKAAQSLNELDYLSQGIDLSGIEVIENDLLFIARARLEVENQAKRLLEQGLETQNPTQVGTALQVFYNLGTLKDTITSVVDGYCATLEENINSALDIKVLTQPSQSAVRGGPGRSTMPTPGNTAALRASLWTNMEKLMDHIYAVCGQVQHLQKVLAKKRDPVSHICFIEEIVKDGQPEIFYTFWNSVTQALSSQFHMATNSSMFLKQAFEGEYPKLLRLYNDLWKRLQQYSQHIQGNFNASGTTDLYVDLQHMEDDAQDIFIPKKPDYDPEKALKDSLQPYEAAYLSKSLSRLFDPINLVFPPGGRNPPSSDELDGIIKTIASELNVAAVDTNLTLAVSKNVAKTIQLYSVKSEQLLPTQGDASQVIGPLTEGQRRNVAVVNSLYKLHQSVTKAIHALMENAVQPLLTSVGDAIEAIIITMHQEDFSGSLSSSGKPDVPCSLYMKELQGFIARVMSDYFKHFECLDFVFDNTEAIAQRAVELFIRHASLIRPLGEGGKMRLAADFAQMELAVGPFCRRVSDLGKSYRMLRSFRPLLFQASEHVASSPALGDVIPFSIIIQFLFTRAPAELKSPFQRAEWSHTRFSQWLDDHPSEKDRLLLIRGALEAYVQSVRSREGKEFAPVYPIMVQLLQKAMSALQ

SEQ ID NO: 686 - protein, 227 aa, Homo sapiens
MGGKLSKKKKGYNVNDEKAKEKDKKAEGAATEEEGTPKESEPQAPAEPAEAKEGKEKPDQDAEGKAEEKEGEKDAAAAKEEAPKAEPEKTEGAAEAKAEPPKAPEQEQAAPGPLRGGEAPKAAEAAAGPRPRAAPAAGEEPSKEEGEPKKTEAPAAPAAQETKSDGAPASDSKPGSSEAAPSSKETPAATEAPSSTPKAQGPAASAEEPKPVEAPAANSDQTVTVKE

SEQ ID NO: 687 - protein, 758 aa, Homo sapiens
  VARIANT 595: Xaa = Any Amino Acid
MSRKISKESKKVNISSSLESEDISLETTVPTDDISSSEEREGKVRITRQLIERKELLHNIQLLKIELSQKTMMIDNLKVDYLTKIEELEEKLNDALHQKQLLTLRLDNQLAFQQKDASKYQELMKQEMETILLRQKQLEETNLQLREKAGDVRRSLRDFELTEEQYIKLKAFPEDQLSIPEYVSVRFYELVNPLRKEICELQVKKNILAEELSTNKNQLKQLTETYEEDRKNYSEVQIRCQRLALELADTKQLIQQGDYRQENYDKVKSERDALEQEVIELRRKHEILEASHMIQTKERSELSKEVVTLEQTVTLLQKDKEYLNRQNMELSVCCAHEEDRLERLQAQLEESKKAREEMYEKYVASRDHYKTEYENKLHDELEQIRLKTNQEIDQLRNASREMYERENRNLREARDNAVAEKERAVMAEKDALEKHDQLLDRYRELQLSTESKVTEFLHQSKLKSFESERVQLLQEETARNLTQCQLECEKYQKKLEVLTKEFYSLQASSEKRITELQAQNSEHQARLDIYEKLEKELDEIIMQTAEIENEDEAERVLFSYGYGANVPTTAKRRLKQSVHLARRVLQLEKQNSLIXKRSGTSKGPSNTAFTRSLTEANSLLNQTQQPYRYLIESVRQRDSKIDSLTESIAQLEKDVSNLNKEKSALLQTKNQMALDLEQLLNHREELAAMKQILVKMHSKHSENSLLLTKTEPKHVTENQKSKTLNVPKEHEDNIFTPKPTLFTKKEAPEWSKKQKMKT

SEQ ID NO: 688 - protein, 131 aa, Homo sapiens
MPPKGKSGSGKAGKGGAASGSDSADKKAQGPKGGGNAVKVRHILCEKHGKIMEAMEKLKSGMRFNEVAAQYSEDKARQGGDLGWMTRGSMVGPFQEAAFALPVSGMDKPVFTDPPVKTKFGYHIIMVEGRK

SEQ ID NO: 689 - protein, 249 aa, Homo sapiens
MAMLRVQPEAQAKVDVFREDLCTKTENLLGSYFPKKISELDAFLKEPALNEANLSNLKAPLDIPVPDPVKEKEKEERKKQQEKEDKDEKKKGEDEDKGPPCGPVNCNEKIVVLLQRLKPEIKDVIEQLNLVTTWLQLQIPRIEDGNNFGVAVQEKVFELMTSLHTKLEGFHTQISKYFSERGDAVTKAAKQPHVGDYRQLVHELDEAEYRDIRLMVMEIRNAYAVLYDIILKNFEKLKKPRGETKGMIY

SEQ ID NO: 690 - protein, 218 aa, Homo sapiens
MSSGAASGTGRGRPRGGGPGPGDPPPSETHKLVVVGGGGVGKSALTIQFIQSYFVSDYDPTIEDSYTKICSVDGIPARLDILDTAGQEEFGAMREQYMRAGHGFLLVFAINDRQSFNEVGKLFTQILRVKDRDDFPVVLVGNKADLESQRQVPRSEASAFGASHHVAYFEASAKLRLNVDEAFEQLVRAVRKYQEQELPPSPPSAPRKKGGGCPCVLL

SEQ ID NO: 691 - protein, 209 aa, Homo sapiens
MEGGGGSGNKTTGGLAGFFGAGGAGYSHADLAGVPLTGMNPLSPYLNVDPRYLVQDTDEFILPTGANKTRGRFELAFFTIGGCCMTGAAFGAMNGLRLGLKETQNMAWSKPRNVQILNMVTRQGALWANTLGSLALLYSAFGVIIEKTRGAEDDLNTVAAGTMTGMLYKCTGGLRGIARGGLTGLTLTSLYALYNNWEHMKGSLLQQSL

SEQ ID NO: 692 - protein, 1591 aa, Homo sapiens [sequence omitted]

SEQ ID NO: 693 - protein, 111 aa, Homo sapiens
MAGKQAVSASGKWLDGIRKWYYNAAGFNKLGLMRDDTIYEDEDVKEAIRRLPENLYNDRMFRIKRALDLNLKHQILPKEQWTKYEEENFYLEPYLKEVIRERKEREEWAKK

SEQ ID NO: 694 - protein, 394 aa, Homo sapiens
MNTNSKEVLSLGVQVPEAWEELLTMKVEAKSHLQWQESRLKRSNPLAREIFRRHFRQLCYQETPGPREALTRLQELCYQWLRPHVSTKEQILDLLVLEQFLSILPKELQGWVREHCPESGEEAVILLEDLERELDEPQHEMVAHRHRQEVLCKEMVPLAEQTPLTLQSQPKEPQLTCDSAQKCHSIGETDEVTKTEDRELVLRKDCPKIVEPHGKMFNEQTWEVSQQDPSHGEVGEHKDRIERQWGNLLGEGQHKCDECGKSFTQSSGLIRHQRIHTGERPYECNECGKAFSRSSGLFNHRGIHNIQKRYHCKECGKVFSQSAGLIQHQRIHKGEKPYQCSQCSKSYSRRSFLIEHQRSHTGERPHQCIECGKSFNRHCNLIRHQKIHTVAELV

SEQ ID NO: 695 - protein, 192 aa, Homo sapiens
YKDLEIQMKKDEKMNISGKKNVDSDRLGMGFGNCRSVISHSVTSDMQTIEQESPIMAKPRKKYNDDSDDSYFTSSSSYFDEPVELRSSSFSSWDDSSDSYWKKETSKDTETVLKTTGYSDRPTARRKPDYEPVENTDEAQKKFGNVKAISSDMYFGRQSQADYETRARLERLSASSSISSADLFEEPRKQPA

SEQ ID NO: 696 - protein, 761 aa, Homo sapiens
GGFAVQHQGPCAFYCDLPVGTLSPSRSSMERRSESPCLRDSPDRRSGSPDVKGPPPVKVARLEQNGSPMGARGRPNGAVAKAVGGLMIPVFCVVEQLDGSLEYDNREEHAEFVLVRKDVLFSQLVETALLALGYSHSSAAQAQGIIKLGRWNPLPLSYVTDAPDATVADMLQDVYHVVTLKIQLQSCSKLEDLPAEQWNHATVRNALKELLKEMNQSTLAKECPLSQSMISSIVNSTYYANVSATKCQEFGRWYKKYKKIKVERVERENLSDYCVLGQRPMHLPNMNQLASLGKTNEQSPHSQIHHSTPIRNQVPALQPIMSPGLLSPQLSPQLVRQQIAMAHLINQQIAVSRLLAHQHPQAINQQFLNHPPIPRAVKPEPTNSSVEVSPDIYQQVRDELKRASVSQAVFARVAFNRTQGLLSEILRKEEDPRTASQSLLVNLRAMQNFLNLPEVERDRIYQDERERSMNPNVSMVSSASSSPSSSRTPQAKTSTPTTDLPIKVDGANINITAAIYDEIQQEMKRAKVSQALFAKVAANKSQGWLCELLRWKENPSPENRTLWENLCTIRRFLNLPQHERDVIYEEESRHHHSERMQHVVQLPPEPVQVLHRQQSQPAKESSPPREEAPPPPPPTEDSCAKKPRSRTKISLEALGILQSFIHDVGLYPDQEAIHTLSAQLDLPKHTIIKFFQNQRYHVKHHGKLKEHLGSAVDVAEYKDEELLTESEENDSEEGSEEMYKVEAEEENADKSKAAPAEIDQR

SEQ ID NO: 697 - protein, 1957 aa, Homo sapiens
LPPVTMSGKYIMEEHDSYSDQVWSIDELPSKQGYYLQGNYLRCVAEVGSFEHNLTTDLLNHLVFVQKVFMKEVNEVIQKVSGGEQPIPLWNEHDGTADGDKPKILLYSLNLQFKGIQVTATTPSMRAVRFETGLIELELSNRLQTKASPGSSSYLKLFGKCQVDLNLALGQIVKHQVYEEAGSDFHQVAYFKTRIGLRNALREEISGSSDREAVLITLNRPIVYAQPVAFDRAVLFWLNYKAAYDNWNEQRMALHKDIHMATKEVVDMLPGIQQTSAQAFGTLFLQLTVNDLGICLPITNTAQSNHTGDLDTGSALVLTIESTLITACSSESLVSKGHFKNFCIRFADGFETSWDDWKPEIHGDLVMNACVVPDGTYEVCSRTTGQAAAESSSAGTWTLNVLWKMCGIDVHMDPNIGKRLNALGNTLTTLTGEEDIDDIADLNSVNIADLSDEDEVDTMSPTIHTEATDYRRQAASASQPGELRGRKIMKRIVDIRELNEQAKVIDDLKKLGASEGTINQEIQRYQQLESVAVNDIRRDVRKKLRRSSMRAASLKDKWGLSYKPSYSRSKSISASGRPPLKRMERASSRVGETEELPEIRVDAASPGPRVTFNIQDTFPEETELDLLSVTIEGPSHYSSNSEGSCSVFSSPKTPGGFSPGIPFQTEEGRRDDSLSSTSEDSEKDEKDEDHERERFYIYRKPSHTSRKKATGFAAVHQLFTERWPTTPVNRSLSGTATERNIDFELDIRVEIDSGKCVLHPTTLLQEHDDISLRRSYDRSSRSLDQDSPSKKKKFQTNYASTTHLMTGKKVPSSLQTKPSDLETTVFYIPGVDVKLHYNSKTLKTESPNASRGSSLPRTLSKESKLYGMKDSATSPPSPPLPSTVQSKTNTLLPPQPPPIPAAKGKGSGGVKTAKLYAWVALQSLPEEMVISPCLLDFLEKALETIPITPVERNYTAVSSQDEDMGHFEIPDPMEESTTSLVSSSTSAYSSFPVDVVVYVRVQPSQIKFSCLPVSRVECMLKLPSLDLVFSSNRGELETLGTTYPAETLSPGGNATQSGTKTSASKTGIPGSSGLGSPLGRSRHSSSQSDLTSSSSSSSGLSFTACMSDFSLYVFHPYGAGKQKTAVSGLTPGSGGLGNVDEEPTSVTGRKDSLSINLEFVKVSLSRIRRSGGASFFESQSVSKSASKMDTTLINISAVCDIGSASFKYDMRRLSEILAFPRAWYRRSIARRLFLGDQTINLPTSGPGTPDSIEGVSQHLSPESSRKAYCKTWEQPSQSASFTHMPQSPNVFNEHMTNSTMSPGTVGQSLKSPASIRSRSVSDSSVPRRDSLSKTSTPFNKSNKAASQQGTPWETLVVFAINLKQLNVQMNMSNVMGNTTWTTSGLKSQGRLSVGSNRDREISMSVGLGRSQLDSKGGVVGGTIDVNALEMVAHISEHPNQQPSHKIQITMGSTEARVDYMGSSILMGIFSNADLKLQDEWKVNLYNTLDSSITDKSEIFVHGDLKWDIFQVMISRSTTPDLIKIGMKLQEFFTQQFDTSKRALSTWGPVPYLPPKTMTSNLEKSSQEQLLDAAHHRHWPGVLKVVSGCHISLFQIPLPEDGMQFGGSMSLHGNHMTLACFHGPNFRSKSWALFHLEEPNIAFWTEAQKIWEDGSSDHSTYIVQTLDFHLGHNTMVTKPCGALESPMATITKITRRRHENPPHGVASVKEWFNYVTATRNEELNLLRNVDANNTENSTTVKNSSLLSGFRGGSSYNHETETIFALPRMQLDFKSIHVQEPQEPSLQDASLKPKVECSVVTEFTDHICVTMDAELIMFLHDLVSAYLKEKEKAIFPPRILSTRPGQKSPIIIHDDNSSDKDREDSITYTTVDWRDFMCNTWHLEPTLRLISWTGRKIDPVGVDYILQKLGFHHARTTIPKWLQRGVMDPLDKVLSVLIKKLGTALQDEKEKKGKDKEEH

SEQ ID NO: 698 - protein, 478 aa, Homo sapiens
  VARIANT 231: Xaa = Any Amino Acid
MFKFHQMKHIFEILDKMRCLRKRSTVSFLGVLVIFLLFMNLYIEDSYVLEGDKQLIRETSTHQLNSERYVHTFKDLSNFSGAINVTYRYLAATPLQRKRYLTIGLSSVKRKKGNYLLETIKSIFEQSSYEELKEISVVVHLADFNSSWRDAMVQDITQKFAHHIIAGRLMVIHAPEEYYPILDGLKRNYNDPEDRVKFRSKQNVDYAFLLNFCANTSDYYVMLEDDVRCSXNFLTAIKKVIASLEGTYWVTLEFSKLGYIGKLYHSHDLPRLAHFLLMFYQEMPCDWLLTHFRGLLAQKNVIRFKPSLFQHMGYYSSYKGTENKLKDDDFEEESFDIPDNPPASLYTNMNVFENYEASKAYSSVDEYFWGKPPSTGDVFVIVFENPIIIKKIKVNTGTEDRQNDILHHGALDVGENVMPSKQRRQCSTYLRLGEFKNGNFEMSGVNQKIPFDIHCMRIYVTKTQKEWLIIRSISIWTS

SEQ ID NO: 699 - protein, 851 aa, Homo sapiens [sequence omitted]

SEQ ID NO: 700 - protein, 415 aa, Homo sapiens [sequence omitted]

SEQ ID NO: 701 - protein, 142 aa, Homo sapiens
MSYMLPHLHNGWQVDQAILSEEDRVVVIRFGHDWDPTCMKMDEVLYSIAEKVKNFAVIYLVDITEVPDFNKMYELYDPCTVMFFFRNKHIMIDLGTGNNNKINWAMEDKQEMVDIIETVYRGARKGRGLVVSPKDYSTKYRY

SEQ ID NO: 702 - protein, 195 aa, Homo sapiens
MAAEDVVATGADPSDLESGGLLHEIFTSPLNLLLLGLCIFLLYKIVRGDQPAASGDSDDDEPPPLPRLKRRDFTPAELRRFDGVQDPRILMAINGKVFDVTKGRKFYGPEGPYGVFAGRDASRGLATFCLDKEALKDEYDDLSDLTAAQQETLSDWESQFTFKYHHVGKLLKEGEEPTVYSDEEEPKDESARKND

SEQ ID NO: 703 - protein, 646 aa, Homo sapiens
MSKGPAVGIDLGTTYSCVGVFQHGKVEIIANDQGNRTTPSYVAFTDTERLIGDAAKNQVAMNPTNTVFDAKRLIGRRFDDAVVQSDMKHWPFMVVNDAGRPKVQVEYKGETKSFYPEEVSSMVLTKMKEIAEAYLGKTVTNAVVTVPAYFNDSQRQATKDAGTIAGLNVLRIINEPTAAAIAYGLDKKVGAERNVLIFDLGGGTFDVSILTIEDGIFEVKSTAGDTHLGGEDFDNRMVNHFIAEFKRKHKKDISENKRAVRRLRTACERAKRTLSSSTQASIEIDSLYEGIDFYTSITRARFEELNADLFRGTLDPVEKALRDAKLDKSQIHDIVLVGGSTRIPKIQKLLQDFFNGKELNKSINPDEAVAYGAAVQAAILSGDKSENVQDLLLLDVTPLSLGIETAGGVMTVLIKRNTTIPTKQTQTFTTYSDNQPGVLIQVYEGERAMTKDNNLLGKFELTGIPPAPRGVPQIEVTFDIDANGILNVSAVDKSTGKENKITITNDKGRLSKEDIERMVQEAEKYKAEDEKQRDKVSSKNSLESYAFNMKATVEDEKLQGKINDEDKQKILDKCNEIINWLDKNQTAEKEEFEHQQKELEKVCNPIITKLYQSAGGMPGGMPGGFPGGGAPPSGGASSGPTIEEVD

SEQ ID NO: 704 - protein, 1575 aa, Homo sapiens
MPHEELPSLQRPRYGSIVDDERLSAEEMDERRRQNIAYEYLCHLEEAKRWMEVCLVEELPPTTELEEGLRNGVYLAKLAKFFAPKMVSEKKIYDVEQTRYKKSGLHFRHTDNTVQWLRAMESIGLPKIFYPETTDVYDRKNIPRMIYCIHALSLYLFKLGIAPQIQDLLGKVDFTEEEISNMRKELEKYGIQMPSFSKIGGILANELSVDEAALHAAVIAINEAVEKGIAEQTVVTLRNPNAVLTLVDDNLAPEYQKELWDAKKKKEENARLKNSCISEEERDAYEELLTQAEIQGNINKVNRQAAVDHINAVIPEGDPENTLLALKKPEAQLPAVYPFAAAMYQNELFNLQKQNTMNYLAHEELLIAVEMLSAVALLNQALESNDLVSVQNQLRSPAIGLNNLDKAYVERYANTLLSVKLEVLSQGQDNLSWNEIQNCIDMVNAQIQEENDRVVAVGYINEAIDEGNPLRTLETLLLPTANISDVDPAHAQHYQDVLYHAKSQKLGDSESVSKVLWLDEIQQAVDEANVDEDRAKQWVTLVVDVNQCLEGKKSSDILSVLKSSTSNANDIIPECADKYYDALVKAKELKSERVSSDGSWLKLNLHKKYDYYYNTDSKESSWVTPESCFYKESWLTGKEIEDIIEEVTVGYIRENIWSASEELLLRFQATSSGPILREEFEARKSFLHEQEENVVKIQAFWKGYKQRKEYMHRRQTFIDNTDSVVKIQSWFRMATARKSYLSRLQYFRDHNNEIVKIQSLLRANKARDDYKTLVGSENPPLTVIRKFVYLLDQSDLDFQEELEVARLREEVVTKIRANQQLEKDLNLMDIKIGLLVKNRITLEDVISHSKKLNKKKGGEMEILNNTDNQGIKSLSKERRKTLETYQQLFYLLQTNPLYLAKLIFQMPQNKSTKFMDTVIFTLYNYASNQREEYLLLKLFKTALEEEIKSKVDQVQDIVTGNPTVIKMVVSFNRGARGQNTLRQLLAPVVKEIIDDKSLIINTNPVEVYKAWVNQLETQTGEASKLPYDVTTEQALTYPEVKNKLEASIENLRRVTDKVLNSIISSLDLLPYGLRYIAKVLKNSIHEKFPDATEDELLKIVGNLLYYRYMNPAIVAPDGFDIIDMTAGGQINSDQRRNLGSVAKVLQHAASNKLFEGENEHLSSMNNYLSETYQEFRKYFKEACNVPEPEEKFNMDKYTDLVTVSKPVIYISIEEIISTHSLLLEHQDAIAPEKNDLLSELLGSLGEVPTVESFLGEGAVDPNDPNKANTLSQLSKTEISLVLTSKYDIEDGEAIDSRSLMIKTKKLIIDVIRNQPGNTLTEILETPATAQQEVDHATDMVSRAMIDSRTPEEMKHSQSMIEDAQLPLEQKKRKIQRNLRTLEQTGHVSSENKYQDILNEIAKDIRNQRIYRKLRKAELAKLQQTLNALNKKAAFYEEQINYYDTYIKTCLDNLKRKNTRRSIKLDGKGEPKGAKRAKPVKYTAAKLHEKGVLLDIDDLQTNQFKNVTFDIIATEDVGIFDVRSKFLGVEMEKVQLNIQDLLQMQYEGVAVMKMFDKVKVNVNLLIYLLNKKFYGK

SEQ ID NO: 705 - protein, 263 aa, Homo sapiens
MSLVAEAFVSQIAAAEPWPENATLYQQLKGEQILLSDNAASLAVQAFLQMCNLPIKVVCRANAEYMSPSGKVPFIHVGNQVVSELGPIVQFVKAKGHSLSDGLEEVQKAEMKAYMELVNNMLLTAELYLQWCDEATVGEITHARYGSPYPWPLNHILAYQKQWEVKRKMKAIGWGKKTLDQVLEDVDQCCQALSQRLGTQPYFFNKQPTELDALVFGHLYTILTTQLTNDELSEKVKNYSNLLAFCRRIEQHYFEDRGKGRLS

SEQ ID NO: 706 - protein, 263 aa, Homo sapiens; identical to SEQ ID NO: 705

SEQ ID NO: 707 - protein, 143 aa, Homo sapiens
MCPRKWSCFGVPGVTHHPLEQPERSRASAPMLLRMSEHRNEALGNYLEMRLKSSFLRGLGSWKSNPLRLGGWTILLTLTMGQGEPGGPRIPGFHTNSSYPHCVTAAMPPPGDQDLLPVPGEEGTPLLTRWSLDTYCPIPLWQL

SEQ ID NO: 708 - protein, 443 aa, Homo sapiens
MQRRDDPAARMSRSSGRSGSMDPSGAHPSVRQTPSRQPPLPHRSRGGGGGSRGGARASPATQPPPLLPPSATGPDATVGGPAPTPLLPPSATASVKMEPENKYLPELMAEKDSLDPSFTHAMQLLTAEIEKIQKGDSKKDDEENYLDLFSHKNMKLKERVLIPVKQYPKFNFVGKILGPQGNTIKRLQEETGAKISVLGKGSMRDKAKEEELRKGGDPKYAHLNMDLHVFIEVFGPPCEAYALMAHAMEEVKKFLVPDMMDDICQEQFLELSYLNGVPEPSRGRGVPVRGRGAAPPPPPVPRGRGVGPPRGALVRGTPVRGAITRGATVTRGVPPPPTVRGAPAPRARTAGIQRIPLPPPPAPETYEEYGYDDTYAEQSYEGYEGYYSQSQGDSEYYDYGHGEVQDSYEAYGQDDWNGTRPSLKAPPARPVKGAYREHPYGRY

SEQ ID NO: 709 - protein, 1956 aa, Homo sapiens
MEFPIGSLETNNFRRFTPESLVEIEKQIAAKQGTKKAREKHREQKDQEEKPRPQLDLKACNQLPKFYGELPAELIGEPLEDLDPFYSTHRTFMVLNKGRTISRFSATRALWLFSPFNLIRRTAIKVSVHSWFSLFITVTILVNCVCMTRTDLPEKIEYVFTVIYTFEALIKILARGFCLNEFTYLRDPWNWLDFSVITLAYVGTAIDLRGISGLRTFRVLRALKTVSVIPGLKVIVGALIHSVKKLADVTILTIFCLSVFALVGLQLFKGNLKNKCVKNDMAVNETTNYSSHRKPDIYINKRGTSDPLLCGNGSDSGHCPDGYICLKTSDNPDFNYTSFDSFAWAFLSLFRLMTQDSWERLYQQTLRTSGKIYMIFFVLVIFLGSFYLVNLILAVVTMAYEEQNQATTDEIEAKEKKFQEALEMLRKEQEVLAALGIDTTSLHSHNGSPLTSKNASERRHRIKPRVSEGSTEDNKSPRSDPYNQRRMSFLGLASGKRRASHGSVFHFRSPGRDISLPEGVTDDGVFPGDHESHRGSLLLGGGAGQQGPLPRSPLPQPSNPDSRHGEDEHQPPPTSELAPGAVDVSAFDAGQKKTFLSAEYLDEPFRAQRAMSVVSIITSVLEELEESEQKCPPCLTSLSQKYLIWDCCPMWVKLKTILFGLVTDPFAELTITLCIVVNTIFMAMEHHGMSPTFEAMLQIGNIVFTIFFTAEMVFKIIAFDPYYYFQKKWNIFDCIIVTVSLLELGVAKKGSLSVLRSFRLLRVFKLAKSWPTLNTLIKIIGNSVGALGNLTIILAIIVFVFALVGKQLLGENYRNNRKNISAPHEDWPRWHMHDFFHSFLIVFRILCGEWIENMWACMEVGQKSICLILFLTVMVLGNLVVLNLFIALLLNSFSADNLTAPEDDGEVNNLQVALARIQVFGHRTKQALCSFFSRSCPFPQPKAEPELVVKLPLSSSKAENHIAANTARGSSGGLQAPRGPRDEHSDFIANPTVWVSVPIAEGESDLDDLEDDGGEDAQSFQQEVIPKGQQEQLQQVERCGDHLTPRSPGTGTSSEDLAPSLGETWKDESVPQAPAEGVDDTSSSEGSTVDCLDPEEILRKIPELADDLEEPDDCFTEGCIRHCPCCKLDTTKSPWDVGWQVRKTCYRIVEHSWFESFIIFMILLSSGSLAFEDYYLDQKPTVKALLEYTDRVFTFIFVFEMLLKWVAYGFKKYFTNAWCWLDFLIVNISLISLTAKILEYSEVAPIKALRTLRALRPLRALSRFEGMRVVVDALVGAIPSIMNVLLVCLIFWLIFSIMGVNLFAGKFWRCINYTDGEFSLVPLSIVNNKSDCKIQNSTGSFFWVNVKVNFDNVAMGYLALLQVATFKGWMDIMYAAVDSREVNMQPKWEDNVYMYLYFVIFIIFGGFFTLNLFVGVIIDNFNQQKKKLGGQDIFMTEEQKKYYNAMKKLGSKKPQKPIPRPLNKFQGFVFDIVTRQAFDITIMVLICLNMITMMVETDDQSEEKTKILGKINQFFVAVFTGECVMKMFALRQYYFTNGWNVFDFIVVVLSIASLIFSAILKSLQSYFSPTLFRVIRLARIGRILRLIRAAKGIRTLLFALMMSLPALFNIGLLLFLVMFIYSIFGMSSFPHVRWEAGIDDMFNFQTFANSMLCLFQITTSAGWDGLLSPILNTGPPYCDPNLPNSNGTRGDCGSPAVGIIFFTTYIIISFLIVVNMYIAVILENFNVATEESTEPLSEDDFDMFYETWEKFDPEATQFITFSALSDFADTLSGPLRIPKPNRNILIQMDLPLVPGDKIHCLDILFAFTKNVLGESGELDSLKANMEEKFMATNLSKSSYEPIATTLRWKQEDISATVIQKAYRSYVLHRSMALSNTPCVPRAEEEAASLPDEGFVAFTANENCVLPDKSETASATSFPPSYESVTRGLSDRVNMRTSSSIQNEDEATSMELIAPGP

SEQ ID NO: 710 - protein, 521 aa, Homo sapiens
MECPHLSSSVCIAPDSAKFPNGSPSSWCCSVCRSNKSPWVCLTCSSVHCGRYVNGHAKKHYEDAQVPLTNHKKSEKQDKVQHTVCMDCSSYSTYCYRCDDFVVNDTKLGLVQKVREHLQNLENSAFTADRHKKRKLLENSTLNSKLLKVNGSTTAICATGLRNLGNTCFMNAILQSLSNIEQFCCYFKELPAVELRNGKTAGRRTYHTRSQGDNNVSLVEEFRKTLCALWQGSQTAFSPESLFYVVWKIMPNFRGYQQQDAHEFNALPFGPPTLGNFRAVSTVFPAQQFCRRILLCLQVNKCCINGASTVVTAIFGGILQNEVNCLICGTESRKFDPFLDLSLDIPSQFRSKRSKNQENGPVCSLRDCLRSFTDLEELDETELYMCHKCKKKQKSTKKFWIQKLPKVLCLHLKRFHWTAYLRNKVDTYVEFPLRGLDMKWYLLEPENSGPESCLYDLAAVVVHHGSGVGSGHYTAYATHEGRWFHFNDSTVTLTDEETVVKAKAYILFYVEHQAKAGSDKL

SEQ ID NO: 711 - protein, 664 aa, Homo sapiens [sequence omitted]

SEQ ID NO: 712 - protein, 798 aa, Homo sapiens [sequence omitted]

SEQ ID NO: 713 - protein, 2294 aa, Homo sapiens [sequence omitted]

SEQ ID NO: 714 - protein, 797 aa, Homo sapiens
MAHRCLRLWGRGGCWPRGLQQLLVPGGVGPGEQPCLRTLYRFVTTQARASRNSLLTDIIAAYQRFCSRPPKGFGKYFPNGKNGKKASEPKEVMGEKKESKPAATTRSSGGGGGGGGKRGGKKDDSHWWSRFQKGDIPWDDKDFRMFFLWTALFWGGVMFYLLLKRSGREITWKDFVNNYLSKGVVDRLEVVNKRFVRVTFTPGKTPVDGQYVWFNIGSVDTFERNLETLQQELGIEGENRVPVVYIAESDGSFLLSMLPTVLIIAFLLYTIRRGPAGIGRTGRGMGGLFSVGETTAKVLKDEIDVKFKDVAGCEEAKLEIMEFVNFLKNPKQYQDLGAKIPKGAILTGPPGTGKTLLAKATAGEANVPFITVSGSEFLEMFVGVGPARVRDLFALARKNAPCILFIDEIDAVGRKRGRGNFGGQSEQENTLNQLLVEMDGFNTTTNVVILAGTNRPDILDPALLRPGRFDRQIFIGPPDIKGRASIFKVHLRPLKLDSTLEKDKLARKLASLTPGFSGADVANVCNEAALIAARHLSDSINQKHFEQAIERVIGGLEKKTQVLQPEEKKTVAYHEAGHAVAGWYLEHADPLLKVSIIPRGKGLGYAQYLPKEQYLYTKEQLLDRMCMTLGGRASEEIFFGRITTGAQDDLRKVTQSAYAQIVQFGMNEKVGQISFDLPRQGDMVLEKPYSEATARLIDDEVRILINDAYKRTVALLTEKKADVEKVALLLLEKEVLDKNDMVELLGPRPFAEKSTYEEFVEGTGSLDEDTSLPEGLKDWNKEREKEKEEPPGEKVAN

SEQ ID NO: 715 - protein, 758 aa, Homo sapiens
MLRACQLSGVTAAAQSCLCGKFVLRPLRPCRRYSTSGSSGLTTGKIAGAGLLFVGGGIGGTILYAKWDSHFRESVEKTIPYSDKLFEMVLGPAAYNVPLPKKSIQSGPLKISSVSEVMKESKQSASQLQKQKGDTPASATAPTEAAQIISAAGDTLSVPAPAVQPEESLKTDHPEIGEGKPTPALSEEASSSSIRERPPEEVAARLAQQEKQEQVKIESLAKSLEDALRQTASVTLQAIAAQNAAVQAVNAHSNILKAAMDNSEIAGEKKSAQWRTVEGALKERRKAVDEAADALLKAKEELEKMKSVIENAKKKEVAGAKPHITAAEGKLHNMIVDLDNVVKKVQAAQSEAKVVSQYHELVVQARDDFKRELDSITPEVLPGWKGMSVSDLADKLSTDDLNSLIAHAHRRIDQLNRELAEQKATEKQHITLALEKQKLEEKRAFDSAVAKALEHHRSEIQAEQDRKIEEVRDAMENEMRTQLRRQAAAHTDHLRDVLRVQEQELKSEFEQNLSEKLSEQELQFRRLSQEQVDNFTLDINTAYARLRGIEQAVQSHAVAEEEARKAHQLWLSVEALKYSMKTSSAETPTIPLGSAVEAIKANCSDNEFTQALTAAIPPESLTRGVYSEETLRARFYAVQKLARRVAMIDETRNSLYQYFLSYLQSLLLFPPQQLKPPPELCPEDINTFKLLSYASYCIEHGDLELAAKFVNQLKGESRRVAQDWLKEARMTLETKQIVEILTAYASAVGIGTTQVQPE

SEQ ID NO: 716 - protein, 201 aa, Homo sapiens
MARDYDHLFKLLIIGDSGVGKSSLLLRFADNTFSGSYITTIGVDFKIRTVEINGEKVKLQIWDTAGQERFRTITSTYYRGTHGVIVVYDVTSAESFVNVKRWLHEINQNCDDVCRILVGNKNDDPERKVVETEDAYKFAGQMGIQLFETSAKENVNVEEMFNCITELVLRAKKDNLAKQQQQQQNDVVKLTKNSKRKKRCC

SEQ ID NO: 717 - protein, 201 aa, Homo sapiens
MVTLAELLVLLAALLATVSGYFVSIDAHAEECFFERVTSGTKMGLIFEVAEGGFLDIDVEITGPDNKGIYKGDRESSGKYTFAAHMDGTYKFCFSNRMSTMTPKIVMFTIDIGEAPKGQDMETEAHQNKLEEMINELAVAMTAVKHEQEYMEVRERIHRAINDNTNSRVVLWSFFEALVLVAMTLGQIYYLKRFFEVRRVV

SEQ ID NO: 718 - protein, 208 aa, Homo sapiens
MKKNEVYETFSYPESYSPTLPVSRRENNSPSNLPRPSFCMEEYQRAELEEDPILSRTPSPVHPSDFSEHNCQPYYASDGATYGSSSGLCLGNPRADSIHNTYSTDHASAAPPSVTRSPVENDGYIEEGSITKHPSTWSVEAVVLFLKQTDPLALCPLVDLFRSHEIDGKALLLLTSDVLLKHLGVKLGTAVKLCYYIDRLKQGKCFEN

SEQ ID NO: 719 - protein, 219 aa, Homo sapiens
MSGLSGPPARRGPFPLALLLLFLLGPRLVLAISFHLPINSRKCLREEIHKDLLVTGAYEISDQSGGAGGLRSHLKITDSAGHILYSKEDATKGKFAFTTEDYDMFEVCFESKGTGRIPDQLVILDMKHGVEAKNYEEIAKVEKLKPLEVELRRLEDLSESIVNDFAYMKKREEEMRDTNESTNTRVLYFSIFSMFCLIGLATWQVFYLRRFFKAKKLIE

SEQ ID NO: 720 - protein, 240 aa, Homo sapiens
MAEYLASIFGTEKDKVNCSFYFKIGACRHGDRCSRLHNKPTFSQTIALLNIYRNPQNSSQSADGLRCAVSDVEMQEHYDEFFEEVFTEMEEKYGEVEEMNVCDNLGDHLVGNVYVKFRREEDAEKAVIDLNNRWFNGQPIHAELSPVTDFREACCRQYEMGECTRGGFCNFMHLKPISRELRRELYGRRRKKHRSRSRSRERRSRSRDRGRGGGGGGGGGGGGRERDRRRSRDRERSGRF

SEQ ID NO: 721 - protein, 76 aa, Homo sapiens
MQLFVKTLTGKTLTVELEPSDTVENLKAKIQDKEGIPPDQQRLIFAGKQLEDGRTLSDYNLQKESTIHLVLRLRGG

SEQ ID NO: 722 - protein, 808 aa, Homo sapiens
GNPEEFQPFTFSLKGLSEEVSHPADFKKGGNQEIGPLPPTGNLKAQVMGDILDKLSEETGHPNSSQVLQSITEPSKIAPSDLLVEQKKTEKALHSDQTVKLPDVSTSSEDKQDLGIKQFSLMRENLPLEQSKSFMTTKPADVKETKMEEFFISPKDENWMLGKPENVASQHEQRIAGSVQLDSSSSNELRPGQLKAAVSSKDHTCEVRKQVLPHSAEESHLSSQEAVSALDTSSGNTETLSSKSYSSEEVKLAEEPKSLVLAGNVERNIAEGKEIHSLMESESLLLEKANTELSWPSKEDSQEKIKLPPERFFQKPVSGLSVEQVKSETISSSVKTAHFPAEGVEPALGNEKEAHRSTPPFPEEKPLEESKMVQSKVIDDADEGKKPSPEVKIPTQRKPISSIHAREPQSPEAPEVTQNPPTQPKVAKPDLPEEKGKKGISSFKSWMSSLFFGSSTPDNKVAEQEDLETQPSPSVEKAVTVIDPEGTIPTNFNVAEKPADHSLSEVKLKTADEPRGTLVKSGDGQNVKEKSMILSNVEDLQQPKFISEVSREDYGKKEISGDSEEMNINSVVTSADGENLEIQSYSLIGEKLVMEEAKTIVPPHVTDSKRVQKPAIAPPSKWNISIFKEEPRSDQKQKSLLSFDVVDKVPQQPKSASSNFASKNITKESEKPESIILPVEESKGSLIDFSEDRLKKEMQNPTSLKISEEETKLRSVSPTEKKDNLENRSYTLAEKKVLAEKQNSVAPLELRDSNEIGKTQITLGSRSTELKESKADAMPQHFYQNEDYNERPKIIVGSEKEKDEKKKK

SEQ ID NO: 723 - protein, 51 aa, Homo sapiens
MVAYWRQAGLSYIRYSQICAKAVRDALKTEFKANAEKTSGSNVKIVKVKKE

SEQ ID NO: 724 - protein, 227 aa, Homo sapiens
MSVVPPNRSQTGWPRGVTQFGNKYIQQTKPLTLERTINLYPLTNYTFGTKEPLYEKDSSVAARFQRMREEFDKIGMRRTVEGVLIVHEHRLPHVLLLQLGTTFFKLPGGELNPGEDEVEGLKRLMTEILGRQDGVLQDWVIDDCIGNWWRPNFEPPQYPYIPAHITKPKEHKKLFLVQLQEKALFAVPKNYKLVAAPLFELYDNAPGYGPIISSLPQLLSRFNFIYN

SEQ ID NO: 725 - protein, 385 aa, Homo sapiens
MAVLSGVRWLTRALVSAGNPGAWRGLSTSAAAHAASRSQAEDVRVEGSFPVTMLPGDGVGPELMHAVKEVFKAAAVPVEFQEHHLSEVQNMASEEKLEQVLSSMKENKVAIIGKIHTPMEYKGELASYDMRLRRKLDLFANVVHVKSLPGYMTRHNNLDLVIIREQTEGEYSSLEHESARGVIECLKIVTRAKSQRIAKFAFDYATKKGRGKVTAVHKANIMKLGDGLFLQCCEEVAELYPKIKFETMIIDNCCMQLVQNPYQFDVLVMPNLYGNIIDNLAAGLVGGAGVVPGESYSAEYAVFETGARHPFAQAVGRNIANPTAMLLSASNMLRHLNLEYHSSMIADAVKKVIKVGKVRTRDMGGYSTTTDFIKSVIGHLQTKGS

SEQ ID NO: 726 - protein, 233 aa, Homo sapiens [sequence omitted]

SEQ ID NO: 727 - protein, 315 aa, Homo sapiens
MVQQRGARAKRDGGPPPPGPGPAEEGAREPGWCKTPSGHIKRPMNAFMVWSQHERRKIMDQWPDMHNAEISKRLGRRWQLLQDSEKIPFVREAERLRLKHMADYPDYKYRPRKKSKGAPAKARPRPPGGSGGGSGSSPGRSCLAAGAAEQREGLWGAGRRRPRTTMKTTTRSCWKCAWSRPRGGSCGGWSRRDGPLGDKRSRAQGPSGEGAAAAAAASPTPSEDEEPEEEEEEAAAAEEGEEETVASGEESLGFLSRLPPGPAGLDCSALDRDPDLQPPSGTSHFEFPDYCTPEVTEMIAGDWRPSSIADLVFTY

SEQ ID NO: 728 - protein, 1167 aa, Homo sapiens
MEELIWEQYTVTLQKDSKRGFGIAVSGGRDNPHFENGETSIVISDVLPGGPADGLLQENDRVVMVNGTPMEDVLHSFAVQQLRKSGKVAAIVVKRPRKVQVAALQASPPLDQDDRAFEVMDEFDGRSFRSGYSERSRLNSHGGRSRSWEDSPERGRPHERARSRERDLSRDRSRGRSLERGLDQDHARTRDRSRGRSLERGLDHDFGPSRDRDRDRSRGRSIDQDYERAYHRAYDPDYERAYSPEYRRGARHDARSRGPRSRSREHPHSRSPSPEPRGRPGPIGVLLMKSRANEEYGLRLGSQIFVKEMTRTGLATKDGNLHEGDIILKINGTVTENMSLTDARKLIEKSRGKLQLVVLRDSQQTLINIPSLNDSDSEIEDISEIESNRSFSPEERRHQYSDYDYHSSSEKLKERPSSREDTPSRLSRMGATPTPFKSTGDIAGTVVPETNKEPRYQEEPPAPQPKAAPRTFLRPSPEDEAIYGPNTKMVRFKKGDSVGLRLAGGNDVGIFVAGIQEGTSAEQEGLQEGDQILKVNTQDFRGLVREDAVLYLLEIPKGEMVTILAQSRADVYRDILACGRGDSFFIRSHFECEKETPQSLAFTRGEVFRVVDTLYDGKLGNWLAVRIGNELEKGLIPNKSRAEQMASVQNAQRDNAGDRADFWRMRGQRSGVKKNLRKSREDLTAVVSVSTKFPAYERVLLREAGFKRPVVLFGPIADIAMEKLANELPDWFQTAKTEPKDAGSEKSTGVVRLNTVRQIIEQDKHALLDVTPKAVDLLNYTQWFPIVIFFNPDSRQGVKTMRQRLNPTSNKSSRKLFDQANKLKKTCAHLFTATINLNSANDSWFGSLKDTIQHQQGEAVWVSEGKMEGMDDDPEDRMSYLTAMGADYLSCDSRLISDFEDTDGEGGAYTDNELDEPAEEPLVSSITRSSEPVQHEESIRKPSPEPRAQMRRAASSDQLRDNSPPPAFKPEPPKAKTQNKEESYDFSKSYEYKSNPSAVAGNETPGASTKGYPPPVAAKPTFGRSILKPSTPIPPQEGEEVGESSEEQDNAPKSVLGKVKIFEKMDHKARLQRMQELQEAQNARIEIAQKHPDIYAVPIKTHKPDPGTPQHTSSRPPEPQKAPSRPYQDTRGSYGSDAEEEEYRQQLSEHSKRGYYGQSARYRDTEL

SEQ ID NO: 729 - protein, 69 aa, Homo sapiens
MVPPVQVSPLIKLGRYSALFLGVAYGATRYNYLKPRAEEERRIAAEEKKKQDELKRIARELAEDDSILK

SEQ ID NO: 730 - protein, 515 aa, Homo sapiens
MGHNGSWISPNASEPHNASGAEAAGVNRSALGEFGEAQLYRQFTTTVQVVIFIGSLLGNFMVLWSTCRTTVFKSVTNRFIKNLACSGICASLVCVPFDIILSTSPHCCWWIYTMLFCKVVKFLHKVFCSVTILSFPAIALDRYYSVLYPLERKISDAKSRELVMYIWAHAVVASVPVFAVTNVADIYATSTCTEVWSNSLGHLVYVLVYNITTVIVPVVVVFLFLILIRRALSASQKKKVIIAALRTPQNTISIPYASQREAELHATLLSMVMVFILCSVPYATLVVYQTVLNVPDTSVFLLLTAVWLPKVSLLANPVLFLTVNKSVRKCLIGTLVQLHHRYSRRNVVSTGSGMAEASLEPSIRSGSQLLEMFHIGQQQIFKPTEDEEESEAKYIGSADFQAKEIFSTCLEGEQGPQFAPSAPPLSTVDSVSQVAPAAPVEPETFPDKYSLQFGFGPFELPPQWLSETRNSKKRLLPPLGNTPEELIQTKVPKVGRVERKMSRNNKVSIFPKVDS

SEQ ID NO: 731 - protein, 3433 aa, Homo sapiens
MAKYGEHEASPDNGQNEFSDIIKSRSDEHNDVQKKTFTKWINARFSKSGKPPINDMFTDLKDGRKLLDLLEGLTGTSLPKERGSTRVHALNNVNRVLQVLHQNNVELVNIGGTDIVDGNHKLTLGLLWSIILHWQVKDVMKDVMSDLQQTNSEKILLSWVRQTTRPYSQVNVLNFTTSWTDGLAFNAVLHRHKPDLFSWDKVVKMSPIERLEHAFSKAQTYLGIEKLLDPEDVAVRLPDKKSIIMYLTSLFEVLPQQVTIDAIREVETLPRKYKKECEEEAINIQSTAPEEEHESPRAETPSTVTEVDMDLDSYQIALEEVLTWLLSAEDTFQEQDDISDDVEEVKDQFATHEAFMMELTAHQSSVGSVLQAGNQLITQGTLSDEEEFEIQEQMTLLNARWEALRVESMDRQSRLHDVLMELQKKQLQQLSAWLTLTEERIQKMETCPLDDDVKSLQKLLEEHKSLQSDLEAEQVKVNSLTHMVVIVDENSGESATAILEDQLQKLGERWTAVCRWTEERWNRLQEINILWQELLEEQCLLKAWLTEKEEALNKVQTSNFKDQKELSVSVRRLAILKEDMEMKRQTLDQLSEIGQDVGQLLDNSKASKKINSDSEELTQRWDSLVQRLEDSSNQVTQAVAKLGMSQIPQKDLLETVRVREQAITKKSKQELPPPPPPKKRQIHVDIEAKKKFDAISAELLNWILKWKTAIQTTEIKEYMKMQDTSEMKKKLKALEKEQRERIPRADELNQTGQILVEQMGKEGLPTEEIKNVLEKVSSEWKNVSQHLEDLERKIQLQEDINAYFKQLDELEKVIKTKEEWVKHTSISESSRQSLPSLKDSCQRELTNLLGLHPKIEMARASCSALMSQPSAPDFVQRGFDSFLGRYQAVQEAVEDRQQHLENELKGQPGHAYLETLKTLKDVLNDSENKAQVSLNVLNDLAKVEKALQEKKTLDEILENQKPALHKLAEETKALEKNVHPDVEKLYKQEFDDVQGKWNKLKVLVSKDLHLLEEIALTLRAFEADSTVIEKWMDGVKDFLMKQQAAQGDDAGLQRQLDQCSAFVNEIETIESSLKNMKEIETNLRSGPVAGIKTWVQTRLGDYQTQLEKLSKEIATQKSRLSESQEKAANLKKDLAEMQEWMTQAEEEYLERDFEYKSPEELESAVEEMKRAKEDVLQKEVRVKILKDNIKLLAAKVPSGGQELTSELNVVLENYQLLCNRIRGKCHTLEEVWSCWIELLHYLDLETTWLNTLEERMKSTEVLPEKTDAVNEALESLESVLRHPADNRTQIRELGQTLIDGGILDDIISEKLEAFNSRYEDLSHLAESKQISLEKQLQVLRETDQMLQVLQESLGELDKQLTTYLTDRIDAFQVPQEAQKIQAEISAHELTLEELRRNMRSQPLTSPESRTARGGSQMDVLQRKLREVSTKFQLFQKPANFEQRMLDCKRVLDGVKAELHVLDVKDVDPDVIQTHLDKCMKLYKTLSEVKLEVETVIKTGRHIVQKQQTDNPKGMDEQLTSLKVLYNDLGAQVTEGKQDLERASQLARKMKKEAASLSEWLSATETELVQKSTSEGLLGDLDTEISWAKNVLKDLEKRKADLNTITESSAALQNLIEGSEPILEERLCVLNAGWSRVRTWTEDWCNTLMNHQNQLEIFDGNVAHISTWLYQAEALLDEIEKKPTSKQEEIVKRLVSELDDANLQVENVRDQALILMNARGSSSRELVEPKLAELNRNFEKVSQHIKSAKLLIAQEPLYQCLVTTETFETGVPFSDLEKLENDIENMLKFVEKHLESSDEDEKMDEESAQIEEVLQRGEEMLHQPMEDNKKEKIRLQLLLLHTRYNKIKAIPIQQRKMGQLASGIRSSLLPTDYLVEINKILLCMDDVELSLNVPELNTAIYEDFSFQEDSLKNIKDQLDKLGEQIAVIHEKQPDVILEASGPEAIQIRDTLTQLNAKWDRINRMYSDRKGCFDRAMEEWRQFHCDLNDLTQWITEAEELLVDTCAPGGSLDLEKARIHQQELEVGISSHQPSFAALNRTGDGIVQKLSQADGSFLKEKLAGLNQRWDAIVAEVKDRQPRLKGESKQVMKYRHQLDEIICWLTKAEHAMQKRSTTELGENLQELRDLTQEMEVHAEKLKWLNRTELEMLSDKSLSLPERDKISESLRTVNMTWNKICREVPTTLKECIQEPSSVSQTRIAAHPNVQKVVLVSSASDIPVQSHRTSEISIPADLDKTITELADWLVLIDQMLKSNIVTVGDVEEINKTVSRMKITKADLEQRHPQLDYVFTLAQNLKNKASSSDMRTAITEKLERVKNQWDGTQHGVELRQQQLEDMIIDSLQWDDHREETEELMRKYEARLYILQQARRDPLTKQISDNQILLQELGPGDGIVMAFDNVLQKLLEEYGSDDTRNVKETTEYLKTSWINLKQSIADRQNALEAEWRTVQASRRDLENFLKWIQEAETTVNVLVDASHRENALQDSILARELKQQMQDIQAEIDAHNDIFKSIDGNRQKMVKALGNSEEATMLQHRLDDMNQRWNDLKAKSASIRAHLEASAEKWNRLLMSLEELIKWLNMKDEELKKQMPIGGDVPALQLQYDHCKALRRELKEKEYSVLNAVDQARVFLADQPIEAPEEPRRNLQSKTELTPEERAQKIAKAMRKQSSEVKEKWESLNAVTSNWQKQVDKALEKLRDLQGAMDDLDADMKEAESVRNGWKPVGDLLIDSLQDHIEKIMAFREEIAPINFKVKTVNDLSSQLSPLDLHPSLKMSRQLDDLNMRWKLLQVSVDDRLKQLQEAHRDFGPSSQHFLSTSVQLPWQRSISHNKVPYYINHQTQTTCWDHPKMTELFQSLADLNNVRFSAYRTAIKIRRLQKALCLDLLELSTTNEIFKQHKLNQNDQLLSVPDVINCLTTTYDGLEQMHKDLVNVPLCVDMCLNWLLNVYDTGRTGKIRVQSLKIGLMSLSKGLLEEKYRYLFKEVAGPTEMCDQRQLGLLLHDAIQIPRQLGEVAAFGGSNIEPSVRSCFQQNNNKPEISVKEFIDWMHLEPQSMVWLPVLHRVAAAETAKHQAKCNICKECPIVGFRYRSLKHFNYDVCQSCFFSGRTAKGHKLHYPMVEYCIPTTSGEDVRDFTKVLKNKFRSKKYFAKHPRLGYLPVQTVLEGDNLETPITLISMWPEHYDPSQSPQLFHDDTHSRIEQYATRLAQMERTNGSFLTDSSSTTGSVEDEHALIQQYCQTLGGESPVSQPQSPAQILKSVEREERGELERIIADLEEEQRNLQVEYEQLKDQHLRRGLPVGSPPESIISPHHTSEDSELIAEAKLLRQHKGRLEARMQILEDHNKQLESQLHRLRQLLEQPESDSRINGVSPWASPQHSALSYSLDPDASGPQFHQAAGEDLLAPPHDTSTDLTEVMEQIHSTFPSCCPNVPSRPQAM

SEQ ID NO: 732 - protein, 3433 aa, Homo sapiens; identical to SEQ ID NO: 731

SEQ ID NO: 733 - protein, 376 aa, Homo sapiens
MADYWKSQPKKFCDYCKCWIADNRPSVEFHERGKNHKENVAKRISEIKQKSLDKAKEEEKASKEFAAMEAAALKAYQEDLKRLGLESEILEPSITPVTSTIPPTSTSNQQKEKKEKKKRKKDPSKGRWVEGITSEGYHYYYDLISGASQWEKPEGFQGDLKKTAVKTVWVEGLSEDGFTYYYNTETGESRWEKPDDFIPHTSDLPSSKVNENSLGTLDESKSSDSHSDSDGEQEAEEGGVSTETEKPKIKFKEKNKNSDGGSDPETQKEKSIQKQNSLGSNEEKSKTLKKSNPYGEWQEIKQEVESHEEVDLELPSTENEYVSTSEADGGGEPKVVFKEKTVTSLGVMADGVAPVFKKRRTENGKSRNLRQRGDDQ

SEQ ID NO: 734 - protein, 129 aa, Homo sapiens
PPLVKVTHHVTSSVTTLRCRALNYYPQNITMKWLKDKQPMDAKEFEPKDVLPNGDGTYQGWITLAVPPGEEQRYTCQVEHPGLDQPLIVIWEPSPSGTLVIGVISGIAVFVVILFIGILFIILRKRQGS

SEQ ID NO: 735 - protein, 362 aa, Homo sapiens
MFSSVAHLARANPFNTPHLQLVHDGLGDLRSSSPGPTGQPRRPRNLAAAAVEEQYSCDYGSGRFFILCGLGGIISCGTTHTALVPLDLVKCRMQVDPQKYKGIFNGFSVTLKEDGVRGLAKGWAPTFLGYSMQGLCKFGFYEVFKVLYSNMLGEENTYLWRTSLYLAASASAEFFADIALAPMEAAKVRIQTQPGYANTLRDAAPKMYKEEGLKAFYKGVAPLWMRQIPYTMMKFACFERTVEALYKFVVPKPRSECSKPEQLVVTFVAGYIAGVFCAIVSHPADSVVSVLNKEKGSSASLVLKRLGFKGVWKGLFARIIMIGTLTALQWFIYDSVKVYFRLPRPPPPEMPESLKKKLGLTQ

SEQ ID NO: 736 - protein, 129 aa, Homo sapiens
MSFPKYKPSSLRTLPETLDPAEYNISPETRRAQAERLAIRAQLKREYLLQYNDPNRRGLIENPALLRWAYARTINVYPNFRPTPKNSLMGALCGFGPLIFIYYIIKTERDRKEKLIQEGKLDRTFHLSY

SEQ ID NO: 737 - protein, 62 aa, Homo sapiens
MAAATLTSKLYSLLFRRTSTFALTIIVGVMFFERAFDQGADAIYDHINEGVRACAIPDLGPA

SEQ ID NO: 738 - protein, 1332 aa, Homo sapiens
MQQAPQPYEFFSEENSPKWRGLLVSALRKVQVQVHPTLSANEESLYYIEELIFQLLNKLCMAQPRTVQDVEERVQKTFPHPIDKWAIADAQSAIEKRKRRNPLLLPVDKIHPSLKEVLGYKVDYHVSLYIVAVLEYISADILKLAGNYVFNIRHYEISQQDIKVSMCADKVLMDMFDQDDIGLVSLCEDEPCSSGELNYYDLVRTEIAEERQYLRELNMIIKVFREAFLSDRKLFKPSVYEKIFSNISDIHELTVKLLGLIEDTVEMTDESSPHPLAGSCFEDLAEEQAFDPYETLSQDILSPEFHEHFNKLMARPAVALHFQSIADGFKEAVRYVLPRLMLVPVYHCWHYFELLKQLKACSEEQEDRECLNQAITALMNHQGSMDRIYKQYSPRRRPGDPVCPFYSHQLRSKHLAIKKMNEIQKNIDGWEGKDIGQCCNEFIMEGPLTRIGAKHERHIFLFDGLMISCKPNHGQTRLPGYTSAEYRLKEKFVMRKIQICDKEDTCEHKHAFELVSKDENSIIFAAKSAEEKNNWMAALISLHYRSTLDRMLDSVLLKEENEQPLRLPSPEVYRFVVKDSEENIVFEDNLQSRSGIPIIKGGTVVKLIERLTYHMYADPNFVRTFLTTYRSFCKPQELLSLLIERFEIPEPEPTDADKLAIEKGEQPISADLKRFRKEYVQPVQLRVLNVFRHWVDHHYYDFERDLELLERLESFISSVRGKAMKKWVESIAKIIRRKKQAQANGVSHNITFESPPPPIEWHISKPGQFETFDLMTLDPIEIARQLTLLESDLYRKVQPSELVGSVWTKEDKEINSPNLLKMIRHTTNLTLWFEKCIVEAENFEERVAVLSRIIEILQVFQDLNNFNGVLEIVSAVNSVSVYRLDHTFEALQERKRKILDEAVELSQDHFKKYLVKLKSINPPCVPFFGIYLTNILKTEEGNNDFLKRKGKDLINFSKRRKVAEITGEIQQYQNQPYCLRIEPDMRRFFENLNPMGSASEKEFTDYLFNKSLEIEPRNCKQPPRFPRKSTFSLKSPGIRPNTGRHGSTSGTLRGHPTPLEREPCKISFSRIAETELESTVSAPTSPNTPSTPPVSASSDLSVFLDVDLNSSCGSNSIFAPVLLPHSKSFFSSCGSLHKLSEEPLIPPPLPPRKKFDHDASNSKGNMKSDDDPPAIPPRQPPPPKVKPRVPVPTGAFDGPLHSPPPPPPRDPLPDTPPPVPLRPPEHFINCPFNLQPPPLGHLHRDSDWLRDISTCPNSPSTPPSTPSPRVPRRCYVLSSSQNNLAHPPAPPVPPRQNSSPHLPKLPPKTYKRELSHPPLYRLPLLENAETPQ

SEQ ID NO: 739 - protein, 270 aa, Homo sapiens
MALRGPGLERPPLTCPELRQEQCCGGCQVGGAGPERRGGLGASTLSPGPDPLQPCVAQQPFPSLPSPLPLQGTLHSSPPGATGRPPLCLSEPSSVSPRPRCFLLPWGSPRPCPRQSQTGGSRGSPAPRPAESGSSSRTTEGGASCPPHPCHCPPAPSPTQGLENSWRQHREAAAYLHGRLQALGLQLFVKDPALRLPTVTTVAVPAGYDWRDIVSYVIDHFDIEIMGGLGPSTGKVLRIGLLGCNATRENVDRVTEALRAALQHCPKKKL

SEQ ID NO: 740 - protein, 738 aa, Homo sapiens [sequence omitted]

SEQ ID NO: 741 - protein, 5373 aa, Homo sapiens
MFPVLWAGIPGRDVGSLQPLPPGFKQFCTSASRVAVIADERDRVQKKTFTKWVNKHLMKVRKHINDLYEDLRDGHNLISLLEVLSGIKLPREKGRMRFHRLQNVQIALDFLKQRQVKLVNIRNDDITDGNPKLTLGLIWTIILHFQISDIYISGESGDMSAKEKLLLWTQKVTAGYTGIKCTNFSSCWSDGKMFNALIHRYRPDLVDMERVQIQSNRENLEQAFEVAERLGVTRLLDAEDVDVPSPDEKSVITYVSSIYDAFPKVPEGGEGISATEVDSRWQEYQSRVDSLIPWIKQHTILMSDKTFPQNPVELKALYNQYIHFKETEILAKEREKGRIEELYKLLEVWIEFGRIKLPQGYHPNDVEEEWGKLIIEMLEREKSLRPAVERLELLLQIANKIQNGALNCEEKLTLAKNTLQADAAHLESGQPVQCESDVIMYIQECEGLIRQLQVDLQILRDENYYQLEELAFRVMRLQDELVTLRLECTNLYRKGHFTSLELVPPSTLTTTHLKAEPLTKATHSSSTSWFRKPMTRAELVAISSSEDEGNLRFVYELLSWVEEMQMKLERAEWGNDLPSVELQLETQQHIHTSVEELGSSVKEARLYEGKMSQNFHTSYAETLGKLETQYCKLKETSSFRMRHLQSLHKFVSRATAELIWLNEKEEEELAYDWSDNNSNISAKRNYFSELTMELEEKQDVFRSLQDTAELLSLENHPAKQTVEAYSAAVQSQLQWMKQLCLCVEQHVKENTAYFQFFSDARELESFLRNLQDSIKRKYSCDHNTSLSRLEDLLQDSMDEKEQLIQSKSSVASLVGRSKTIVQLKPRSPDHVLKNTISVKAVCDYRQIEITICKNDECVLEDNSQRTKWKVISPTGNEAMVPSVCFLIPPPNKDAIEMASRVEQSYQKVMALWHQLHVNTKSLISWNYLRKDLDLVQTWNLEKLRSSAPGECHQIMKNLQAHYEDFLQDSRDSVLFSVADRLRLEEEVEACKARFQHLMKSMENEDKEETVAKMYISELKNIRLRLEEYEQRVVKRIQSLASSRTDRDAWQDNALRIAEQEHTQEDLQQLRSDLDAVSMKCDSFLHQSPSSSSVPTLRSELNLLVEKMDHVYGLSTVYLNKLKTVDVIVRSIQDAELLVKGYEIKLSQEEVVLADLSALEAHWSTLRHWLSDVKDKNSVFSVLDEEIAKAKVVAEQMSRLTPERNLDLERYQEKGSQLQERWHRVIAQLEIRQSELESIQEVLGDYRACHGTLIKWIEETTAQQEMMKPGQAEDSRVLSEQLSQQTALFAEIERNQTKLDQCQKFSQQYSTIVKDYELQLMTYKAFVESQQKSPGKRRRMLSSSDAITQEFMDLRTRYTALVTLTTQHVKYISDALRRLEEEEKVVEEEKQEHVEKVKELLGWVSTLARNTQGKATSSETKESTDIEKAILEQQVLSEELTTKKEQVSEAIKTSQIFLAKHGHKLSEKEKKQISEQLNALNKAYHDLCDGSANQLQQLQSQLAHQTEQKTLQKQQNTCHQQLEDLCSWVGQAERALAGHQGRTTQQDLSALQKNQSDLKDLQDDIQNRATSFATVVKDIEGFMEENQTKLSPRELTALREKLHQAKEQYEALQEETRVAQKELEEAVTSALQQETEKSKAAKELAENKKKIDALLDWVTSVGSSGGQLLTNLPGMEQLSGASLEKGALDTTDGYMGVNQAPEKLDKQCEMMKARHQELLSQQQNFILATQSAQAFLDQHGHNLTPEEQQMLQQKLGELKEQYSTSLAQSEAELKQVQTLQDELQKFLQDHKEFESWLERSEKELENMHKGGSSPETLPSLLKRQGSFSEDVISHKGDLRFVTISGQKVLDMENSFKEGKEPSEIGNLVKDKLKDATERYTALHSKCTRLGSHLNMLLGQYHQFQNSADSLQAWMQACEANVEKLLSDTVASDPGVLQEQLATTKQLQEELAEHQVPVEKLQKVARDIMEIEGEPAPDHRHVQETTDSILSHFQSLSYSLAERSSLLQKAIAQSQSVQESLESLLQSIGEVEQNLEGKQVSSLSSGVIQKALATNMKLKQDIARQKSSLEATREMVTRFMETADSTTAAVLQGKLAEVSQRFEQLCLQQQEKESSLKKLLPQAEMFEHLSGKLQQFMENKSRMLASGNQPDQDITHFFQQIQELNLEMEDQQENLDTLEHLVTELSSCGFALDLCQHQDRVQNLRKDFTELQKTVKEREKDASSCQEQLDEFRKLVRTFQKWLKETEGSIPPTETSVSAKELEKQIEHLKSLLDDWASKGTLVEEINCKGTSLENLIMEITAPDSQGKTDLTEIQCDMSDVNLKYEKLGGVLHERQESLQAILNRMEEVHKEANSVLQWLESKEEVLKSMDAMSSPTKTETVKAQAESNKAFLAELEQNSPKIQKVKEALAGLLVTYPNSQEAENWKKIQEELNSRWERATEVTVARQRQLEESASHLACFQAAESQLRPWLMEKELMMGVLGPLSIDPNMLNAQKQQVQFMLKEFEARRQQHEQLNEAAQGILTGPGDVSLSTSQVQKELQSINQKWVELTDKLNSRSSQIDQAIVKSTQYQELLQDLSEKVRAVGQRLSVQSAISTQPEAVKQQLEETSEIRSDLEQLDHEVKEAQTLCDELSVLIGEQYLKDELKKRLETVALPLQGLEDLAADRINRLQAALASTQQFQQMFDELRTWLDDKQSQQAKNCPISAKLERLQSQLQENEEFQKSLNQHSGSYEVIVAEGESLLLSVPPGEEKRTLQNQLVELKNHWEELSKKTADRQSRLKDCMQKAQKYQWHVEDLVPWIEDCKAKMSELRVTLDPVQLESSLLRSKAMLNEVEKRRSLLEILNSAADILINSSEADEDGIRDEKAGINQNMDAVTEELQAKTGSLEEMTQRLREFQESFKNIEKKVEGAKHQLEIFDALGSQACSNKNLEKLRAQQEVLQALEPQVDYLRNFTQGLVEDAPDGSDASQLLHQAEVAQQEFLEVKQRVNSGCVMMENKLEGIGQFHCRVREMFSQLADLDDELDGMGAIGRDTDSLQSQIEDVRLFLNKIHVLKLDIEASEAECRHMLEEEGTLDLLGLKRELEALNKQCGKLTERGKARQEQLELTLGRVEDFYRKLKGLNDATTAAEEAEALQWVVGTEVEIINQQLADFKMFQKEQVDPLQMKLQQVNGLGQGLIQSAGKDCDVQGLEHDMEEINARWNTLNKKVAQRIAQLQEALLHCGKFQDALEPLLSWLADTEELIANQKPPSAEYKVVKAQIQEQKLLQRLLDDRKATVDMLQAEGGRIAQSAELADREKITGQLESLESRWTELLSKAAARQKQLEDILVLAKQFHETAEPISDFLSVTEKKLANSEPVGTQTAKIQQQIIRHKALEEDIENHATDVHQAVKIGQSLSSLTSPAEQGVLSEKIDSLQARYSEIQDRCCRKAALLDQALSNARLFGEDEVEVLNWLAEVEDKLSSVFVKDFKQDVLHRQHADHLALNEEIVNRKKNVDQAIKNGQALLKQTTGEEVLLIQEKLDGIKTRYADITVTSSKALRTLEQARQLATKFQSTYEELTGWLREVEEELATSGGQSPTGEQIPQFQQRQKELKKEVMEHRLVLDTVNEVSRALLELVPWRAREGLDKLVSDANEQYKLVSDTIGQRVDEIDAAIQRSQQYEQAADAELAWVAETKRKLMALGPIRLEQDQTTAQLQVQKAFSIDIIRHKDSMDELFSHRSEIFGTCGEEQKTVLQEKTESLIQQYEAISLLNSERYARLERAQVLVNQFWETYEELSPWIEETRALIAQLPSPAIDHEQLRQQQEEMRQLRESIAEHKPHIDKLLKIGPQLKELNPEEGEMVEEKYQKAENMYAQIKEEVRQRALALDEAVSQSTQITEFHDKIEPMLETLENLSSRLRMPPLIPAEVDKIRECISDNKSATVELEKLQPSFEALKRRGEELIGRSQGADKDLAAKEIQDKLDQMVFFWEDIKARAEEREIKFLDVLELAEKFWYDMAALLTTIKDTQDIVHDLESPGIDPSIIKQQVEAAETIKEETDGLHEELEFIRILGADLIFACGETEKPEVRKSIDEMNNAWENLNKTWKERLEKLEDAMQAAVQYQDTLQAMFDWLDNTVIKLCTMPPVGTDLNTVKDQLNEMKEFKVEVYQQQIEMEKLNHQGELMLKKATDETDRDIIREPLTELKHLWENLGEKIAHRQHKLEGALLALGQFQHALEELMSWLTHTEELLDAQRPISGDPKVIEVELAKHHVLKNDVLAHQATVETVNKAGNELLESSAGDDASSLRSRLEAMNQCWESVLQKTEEREQQLQSTLQQAQGFHSEIEDFLLELTRMESQLSASKPTGGLPETAREQLDTHMELYSQLKAKEETYNQLLDKGRLMLLSRDDSGSGSKTEQSVALLEQKWHVVSSKMEERKSKLEEALNLATEFQNSLQEFINWLTLAEQSLNIASPPSLILNTVLSQIEEHKVFANEVNAHRDQIIELDQTGNQLKFLSQKQDVVLIKNLLVSVQSRWEKVVQRSIERGRSLDDARKRAKQFHEAWKKLIDWLEDAESHLDSELEISNDPDKIKLQLSKHKEFQKTLGGKQPVYDTTIRTGRALKEKTLLPEDTQKLDNFLGEVRDKWDTVCGKSVERQHKLEEALLFSGQFMDALQALVDWLYKVEPQLAEDQPVHGDLDLVMNLMDAHKVFQKELGKRTGTVQVLKRSGRELIENSRDDTTWVKGQLQELSTRWDTVCKLSVSKQSRLEQALKQAEVFRDTVHMLLEWLSEAEQLRFRGALPDDTEALQSLIDTHKEFMKKVEEKRVDVNSAVAMGEVILAVCHPDCITTIKHWITIIRARFEEVLTWAKQHQQRLETALSELVANAELLEELLAWIQWAETTLIQRDQEPIPQNIDRVKALIAEHQTFMEEMTRKQPDVDRVTKTYKRKNIEPTHAPFIEKSRSGGRKSLSQPTPPPMPILSQSEAKNPRINQLSARWQQVWLLALERQRKLNDALDRLEELKEFANFDFDVWRKKYMRWMNHKKSRVMDFFRRIDKDQDGKITRQEFIDGILASKFPTTKLEMTAVADIFDRDGDGYIDYYEFVAALHPNKDAYRPTTDADKIEDEVTRQVAQCKCAKRFQVEQIGENKYRFGDSQQLRLVRILRSTVMVRVGGGWMALDEFLVKNDPCRARGRTNIELREKFILPEGASQGMTPFRSRGRRSKPSSRAASPTRSSSSASQSNHSCTSMPSSPATPASGTKVIPSSGSKLKRPTPTFHSSRTSLAGDTSNSSSPASTGAKTNRADPKKSASRPGSRAGSRAGSRASSRRGSDASDFDLLETQSACSDTSESSAAGGQGNSRRGLNKPSKIPTMSKKTTTASPRTPGPKR

SEQ ID NO: 742 - protein, 179 aa, Homo sapiens
MAFLASGPYLTHQQKVLRLYKRALRHLESWCVQRDKYRYFACLMRARFEEHKNEKDMAKATQLLKEAEEEFWYRQHPQPYIFPDSPGGTSYERYDCYKVPEWCLDDWHPSEKAMYPDYFAKREQWKKLRRESWEREVKQLQEETPPGGPLTEALPPARKEGDLPPLWWYIVTRPRERPM

SEQ ID NO: 743 - protein, 387 aa, Homo sapiens
MAGAEWKSLEECLEKHLPLPDLQEVKRVLYGKELRKLDLPREAFEAASREDFELQGYAFEAAEEQLRRPRIVHVGLVQNRIPLPANAPVAEQVSALHRRIKAIVEVAAMCGVNIICFQEAWTMPFAFCTREKLPWTEFAESAEDGPTTRFCQKLAKNHDMVVVSPILERDSEHGDVLWNTAVVISNSGAVLGKTRKNHIPRVGDFNESTYYMEGNLGHPVFQTQFGRIAVNICYGRHHPLNWLMYSINGAEIIFNPSATIGALRSLSESLWPIEARNAAIANHCFTCAINRVGTEHFPNEFTSGDGKKAHQDFGYFYGSSYVAAPDSSRTPGLSRSRDGLLVAKLDLNLCQQVNDVWNFKMTGRYEMYARELAEAVKSNYSPTIVKE

SEQ ID NO: 744 - protein, 1487 aa, Homo sapiens
AGRNAPGGLHRAVCFRRLRGSLGPCGGAAPRGFARSLTSPCSLAAAGGARAAAGDPEKGEELNVIMSGIKRTIKETDPDYEDVSVALPNKRHKAIENSARDAAVQKIETIIKEQFALEMKNKEHEIEVIDQRLIEARRMMDKLRACIVANYYASAGLLKVSEGSKTCDTMVFNHPAIKKFLESPSRSSSPANQRAETPSANHSESDSLSQHNDFLSDKDNNSNMDIEERLSNNMEQRPSRNTGRDTSRITGSHKTEQRNADLTDETSRLFVKKTIVVGNVSKYIPPDKREENDQSTHKWMVYVRGSRREPSINHFVKKVWFFLHPSYKPNDLVEVREPPFHLTRRGWGEFPVRVQVHFKDSQNKRIDIIHNLKLDRTYTGLQTLGAETVVDVELHRHSLGEDCIYPQSSESDISDAPPSLPLTIPAPVKASSPIKQSHEPVPDTSVEKGFPASTEAERHTPFYALPSSLERTPTKMTTSQKVTFCSHGNSAFQPIASSCKIVPQSQVPNPESPGKSFQPITMSCKIVSGSPISTPSPSPLPRTPTSTPVHVKQGTAGSVINNPYVIMDKQPGQVIGATTPSTGSPTNKISTASQVSQGTGSPVPKIHGSSFVTSTVKQEDSLFASMPPLCPIGSHPKVQSPKPITGGLGAFTKVIIKQEPGEAPHVPATGAASQSPLPQYVTVKGGHMIAVSPQKQVITPGEGIAQSAKVQPSKVVGVPVGSALPSTVKQAVAISGGQILVAKASSSVSKAVGPKQVVTQGVAKAIVSGGGGTIVAQPVQTLTKAQVTAAGPQKSGSQGSVMATLQLPATNLANLANLPPGTKLYLTTNSKNPSGKGKLLLIPQGAILRATNNANLQSGSAASGGSGAGGGGGGGGGGGSGSGGGGSTGGGGGTAGGGTQSTAGPGGISQHLTYTSYILKQTPQGTFLVGQPSPQTSGKQLTTGSVVQGTLGVSTSSAQGQQTLKVISGQKTTLFTQAAHGGQASLMKISDSTLKTVPATSQLSKPGTTMLRVAGGVITTATSPAVALSANGPAQQSEGMAPVSSSTVSSVTKTSGQQQVCVSQATVGTCKAATPTVVSATSLVPTPNPISGKATVSGLLKIHSSQSSPQQAVLTIPSQLKPLSVNTSGGVQTILMPVNKVVQSFSTSKPPAILPVAAPTPVVPSSAPAAVAKVKTEPETPGPSCLSQEGQTAVKTEESSELGNYVIKIDHLETIQQLLTAVVKKIPLITAKSEDASCFSAKSVEQYYGWNIGKRRAAEWQRAMTMRKVLQEILEKNPRFHHLTPLKTKHIAHWCRCHGYTPPDPESLRNDGDSIEDVLTQIDSEPECPSSFSSADNLCRKLEDLQQFQKREPENEEEVDILSLSEPVKINIKKEQEEKQEEVKFYLPPTPGSEFIGDVTQKIGITLQPVALHRNVYASVVEDMILKATEQLVNDILRQALAVGYQTASHNRIPKEITVSNIHQAICNIPFLDFLTNKHMGILNEDQ

SEQ ID NO: 745 - protein, 1011 aa, Homo sapiens
QPPDLAAARTRPARPAARLLAAHDVPVFGWRSRSSGPPATFPSSKGGGGSSYMEEMYFAWLENPQSVHKSWDSFFREASEEAFSGSAQPRPPSVVHESRSAVSSRTKTSKLVEDHLAVQSLIRAYQIRGHHVAQLDPLGILDADLDSFVPSDLITTIDKLAFYDLQEADLDKEFQLPTTTFIGGSENTLSLREIIRRLENTYCQHIGLEFMFINDVEQCQWIRQKFETPGVMQFSSEEKRTLLARLVRSMRFEDFLARKWSSEKRFGLEGCEVMIPALKTIIDKSSEMGIENVILGMPHRGRLNVLANVIRKDLEQIFCQFDPKLEAADEGSGDVKYHLGMYHERINRVTNRNITLSLVANPSHLEAVDPVVQGKTKAEQFYRGDAQGKKVMSILVHGDAAFAGQGVVYETFHLSDLPSYTTNGTVHVVVNNQIGFTTDPRMARSSPYPTDVARVVNAPIFHVNADDPEAVIYVCSVAAEWRNTFNKDVVVDLVCYRRRGHNEMDEPMFTQPLMYKQIHRQVPVLKKYADKLIAEGTVTLQEFEEEIAKYDRICEEAYGRSKDKKILHIKHWLDSPWPGFFNVDGEPKSMTCPATGIPEDMLTHIGSVASSVPLEDFKIHTGLSRILRGRADMTKNRTVDWALAEYMAFGSLLKEGIHVRLSGQDVERGTFSHRHHVLHDQEVDRRTCVPMNHLWPDQAPYTVCNSSLSEYGVLGFELGYAMASPNALVLWEAQFGDFHNTAQCIIDQFISTGQAKWVRHNGIVLLLPHGMEGMGPEHSSARPERFLQMSNDDSDAYPAFTKDFEVSQLYDCNWIVVNCSTPANYFHVLRRQILLPFRKPLIIFTPKSLLRHPEAKSSFDQMVSGTSFQRVIPEDGAAARAPEQVQRLIFCTGKVYYDLVKERSSQDLEEKVAITRLEQISPFPFDLIKQEAEKYPGAELAWCQEEHKNMGYYDYISPRFMTILRRARPIWYVGRDPAAAPATGNRNTHLVSLKKFLDTAFNLQAFEGKTF

SEQ ID NO: 746 - protein, 1148 aa, Homo sapiens
MGQQPGKVLGDQRRPSLPALHFIKGAGKKESSRHGGPHCNVFVEQALQRPVASDFEPQGLSEAARWNSKENLLAGPSENDPNLFVALYDFVASGDNTLSITKGEKLRVLGYNHNGEWCEAQTKNGQGWVPSNYITPVNSLEKHSWYHGPVSRNAAEYPLSSGINGSFLVRESESSPSQRSISLRYEGRVYHYRINTASDGKLYVSSESRFNTLAELVHHHSTVADGLITTLHYPAPKRNKPTVYGVSPNYDKWEMERTDITMKHKLGGGQYGEVYEGVWKKYSLTVAVKTLKEDTMEVEEFLKEAAVMKEIKHPNLVQLLGVCTREPPFYIITEFMTYGNLLDYLRECNRQEVNAVVLLYMATQISSAMEYLEKKNFIHRDLAARNCLVGENHLVKVADFGLSRLMTGDTYTAHAGAKFPIKWTAPESLAYNKFSIKSDVWAFGVLLWEIATYGMSPYPGIDRSQVYELLEKDYRMKRPEGCPEKVYELMRACWQWNPSDRPSFAEIHQAFETMFQESSISDEVEKELGKQGVRGAVTTLLQAPELPTKTRTSRRAAEHRDTTDVPEMPHSKGQGESDPLDHEPAVSPLLPRKERGPPEGGLNEDERLLPKDKKTNLFSALIKKKKKTAPTPPKRSSSFREMDGQPERRGAGEEEGRDISNGALAFTPLDTADPAKSPKPSNGAGVPNGALRESGGSGFRSPHLWKKSSTLTSSRLATGEEEGGGSSSKRFLRSCSVSCVPHGAKDTEWRSVTLPRDLQSTGRQFDSSTFGGHKSEKPALPRKRAGENRSDQVTRGTVTPPPRLVKKNEEAADEVFKDIMESSPGSSPPNLTPKPLRRQVTVAPASGLPHKEEAWKGSALGTPAAAEPVTPTSKAGSGAPRGTSKGPAEESRVRRHKHSSESPGRDKGKLSKLKPAPPPPPAASAGKAGGKPSQRPGQEAAGEAVLGAKTKATSLVDAVNSDAAKPSQPAEGLKKPVLPATPKPHPAKPSGTPISPAPVPLSTLPSASSALAGDQPSSTAFIPLISTRVSLRKTRQPPERASGAITKGVVLDSTEALCLAISGNSEQMASHSAVLEAGKNLYTFCVSYVDSIQQMRNKFAFREAINKLENNLRELQICPASAGSGPAATQDFSKLLSSVKEISDIVQR

SEQ ID NO: 747 - protein, 1096 aa, Homo sapiens
MEQPGAAASGAGGGSEEPGGGRSNKRSAGNRAANEEETKNKPKLNIQIKTLADDVRDRITSFRKSTVKKEKPLIQHPIDSQVAMSEFPAAQPLYDERSLNLSEKEVLDLFEKMMEDMNLNEEKKAPLRNKDFTTKREMVVQYISATAKSGGLKNSKHECTLSSQEYVHELRSGISDEKLLNCLESLRVSLTSNPVSWVNNFGHEGLGLLLDELEKLLDKKQQENIDKKNQYKLIQCLKAFMNNKFGLQRILGDERSLLLLARAIDPKQPNMMTEIVKILSAICIVGEENILDKLLGAITTAAERNNRERFSPIVEGLENQEALQLQVACMQFINALVTSPYELDFRIHLRNEFLRSGLKTMLPDLKEKENDELDIQLKVFDENKEDDLTELSHRLNDIRAEMDDMNEVYHLLYNMLKDTAAENYFLSILQHFLLIRNDYYIRPQYYKIIEECVSQIVLHCSGMDPDFKYRQRLDIDLTHLIDSCVNKAKVEESEQKAAEFSKKFDEEFTARQEAQAELQKRDEKIKELEAEIQQLRTQAQVLSSSSGIPGPPAAPPLPGVGPPPPPPAPPLPGGAPLPPPPPPLPGMMGIPPPPPPPLLFGGPPPPPPLGGVPPPPGISLNLPYGMKQKKMYKPEVSMKRINWSKIEPTELSENCFWLRVKEDKFENPDLFAKLALNFATQIKVQKNAEALEEKKTGPTKKKVKELRILDPKTAQNLSIFLGSYRMPYEDIRNVILEVNEDMLSEALIQNLVKHLPEQKILNELAELKNEYDDLCEPEQFGVVMSSVKMLQPRLSSILFKLTFEEHINNIKPSIIAVTLACEELKKSESFNRLLELVLLVGNYMNSGSRNAQSLGFKINFLCKIRDTKSADQKTTLLHFIADICEEKYRDILKFPEELEHVESASKVSAQILKSNLASMEQQIVHLERDIKKFPQAENQHDKFVEKMTSFTKTAREQYEKLSTMHNNMMKLYENLGEYFIFDSKTVSIEEFFGDLNNFRTLFLEAVRENNKRREMEEKTRRAKLAKEKAEQEKLERQKKKKQLIDINKEGDETGVMDNLLEALQSGAAFRDRRKRIPRNPVVNHPCATRANPRSAT

SEQ ID NO: 748 - protein, 759 aa, Homo sapiens
IPAGMEADLSQLSEEERRQIAAVMSRAQGLPKGSVPPAAAESPSMHRKQELDSSHPPKQSGRPPDPGRPAQPGLSKSRTTDTFRSEQKLPGRSPSTISLKESKSRTDLKEEHKSSMMPGFLSEVNALSAVSSVVNKFNPFDLISDSEASQEETTKKQKVVQKEQGKPEGIIKPPLQQQPPKPIPKQQGPGRDPLQQDGTPKSISSQQPEKIKSQPPGTGKPIQGPTQTPQTDHAKLPLQRDASRPQTKQADIVRGESVKPSLPSPSKPPIQQPTPGKPPAQQPGHEKSQPGPAKPPAQPSGLTKPLAQQPGTVKPPVQPPGTTKPPAQPLGPAKPPAQQTGSEKPSSEQPGPKALAQPPGVGKTPAQQPGPAKPPTQQVGTPKPLAQQPGLQSPAKAPGPTKTPAQTKPPSQQPGSTKPPPQQPGPAKPSPQQPGSTKPPSQQPGSAKPSAQQPSPAKPSAQQFTKPVSQTGFGKPLQPPTVSPSAKQPPSQGLPKTICPLCNTTELLLHVPEKANFNTCTECQTTVCSLCGFNPNPHLTEAKEWLCLNCQMKRALGGDLAPVPSSPQPKLKTAPVTTTSAVSKSSPQPQQTSPKKDAAPKQDLSKAPEPKKPPPLVKQPTLHGSPSAKAKQPPEADSLSKPAPPKEPSVPSEQDKAPVADDKPKQPKMVKPTTDLVSSSSATTKPDIPSSKVQSQAEEKTTPPLKTDSAKPSQSFPPTGEKVTPFDSKAIPRPASDSKIISHPGPSSESKGQKQVDPV

SEQ ID NO: 749 - protein, 410 aa, Homo sapiens
MSLSNKLTLDKLDVKGKRVVMRVDFNVPMKNNQITNNQRIKAAVPSIKFCLDNGAKSVVLMSHLGRPDGVPMPDKYSLEPVAVELKSLLGKDVLFLKDCVGPEVEKACANPAAGSVILLENLRFHVEEEGKGKDASGNKVKAEPAKIEAFRASLSKLGDVYVNDAFGTAHRAHSSMVGVNLPQKAGGFLMKKELNYFAKALESPERPFLAILGGAKVADKIQLINNMLDKVNEMIIGGGMAFTFLKVLNNMEIGTSLFDEEGAKIVKDLMSKAEKNGVKITLPVDFVTADKFDENAKTGQATVASGIPAGWMGLDCGPESSKKYAEAVTRAKQIVWNGPVGVFEWEAFARGTKALMDEVVKATSRGCITIIGGGDTATCCAKWNTEDKVSHVSTGGGASLELLEVPVHSP

SEQ ID NO: 750 - protein, 229 aa, Homo sapiens
MTTAARPTFEPARGGRGKGEGDLSQLSKQYSSRDLPSHTKIKYRQTTQDAPEEVRNRDFRRELEERERAAAREKNRDRPTREHTTSSSVSKKPRLDQIPAANLDADDPLTDEEDEDFEEESDDDDTAALLAELEKIKKERAEEQARKEQEQKAEEERIRMENILSGNPLLNLTGPSQPQANFKVKRRWDDDVVFKNCAKGVDDQKKDKRFVNDTLRSEFHKKFMEKYIK

SEQ ID NO: 751 - protein, 268 aa, Homo sapiens
RSGPFAPVLSATSRGVAGALRPLVQATVPATPEQPVLDLKRPFLSRESLSGQAVRRPLVASVGLNVPASVCYSHTDVKVPDFSEYRRLEVLDSTKSSRESTEARKGFSYLVTGVTTVGVAYAAKNAVTQFVSSMSASADVLALAKIEIKLSDIPEGKNMAFKWRGKPLFVRHRTQKEIKQEAAVELSQLRDPQHDLDRVKKPEWVILIGVCTHLGCVPIANAGDFGGYYCPCHGSHYDASGRIRLGPATLNLEVPTYEFTSDDMVIVG

SEQ ID NO: 752 - protein, 231 aa, Homo sapiens
ENVANIYKDLQKLSRLFKDQLVYPLLAFTRQALNLPDVFGLVVLPLELKLRIFRLLDVRSVLSLSAVCRDLFTASNDPLLWRFLYLRDFRDNTVRVQDTDWKELYRKRHIQRKESPKGRFVMLLPSSTHTIPFYPNPLHPRPFPSSRLPPGIIGGEYDQRPTLPYVGDPISSLIPGPGETPSQFPPLRPRFDPVGPLPGPNPILPGRGGPNDRFPFRPSRGRPTDGRLSFM

SEQ ID NO: 753 - protein, 176 aa, Homo sapiens
HPVRRVPAAAAASPAGADRTKPNRAGAAGAAGPPWTTSRCCRSGRPPTTWRPARRLLVRPARLRRHPRRAPAAALPLPRHRDTHPPSQGLQHPQPDRHPLSCQLYRGRRRLSCLQGWGAGGLLHLPGHLPGHHPLPLWVHLLFCLEEATMPQLWSHLRLKGTPGPGFPTPSSLFLM

SEQ ID NO: 754 - protein, 445 aa, Homo sapiens
MNEEYDVIVLGTGLTECILSGIMSVNGKKVLHMDRNPYYGGESASITPLEDLYKRFKIPGSPPESMGRGRDWNVDLIPKFLMANGQLVKMLLYTEVTRYLDFKVTEGSFVYKGGKIYKVPSTEAEALASSLMGLFEKRRFRKFLVYVANFDEKDPRTFEGIDPKKTTMRDVYKKFDLGQDVIDFTGHALALYRTDDYLDQPCYETINRIKLYSESLARYGKSPYLYPLYGLGELPQGFARLSAIYGGTYMLNKPIEEIIVQNGKVIGVKSEGEIARCKQLICDPSYVKDRVEKVGQVIRVICILSHPIKNTNDANSCQIIIPQNQVNRKSDIYVCMISFAHNVAAQGKYIAIVSTTVETKEPEKEIRPALELLEPIEQKFVSISDLLVPKDLGTESQIFISRTYDATTHFETTCDDIKNIYKRMTGSEFDFEEMKRKKNDIYGED

SEQ ID NO: 755 - protein, 305 aa, Homo sapiens
CSRSVASKTPVGFIGLGNMGNPMAKNLMKHGYPLIIYDVFPDACKEFQDAGEQVVSSPADVAEKADRIITMLPTSINAIEAYSGANGILKKVKKGSLLIDSSTIDPAVSKELAKEVEKMGAVFMDAPVSGGVGAARSGNLTFMVGGVEDEFAAAQELLGCMGSNVVYCGAVGTGQAAKICNNMLLAISMIGTAEAMNLGIRLGLDPKLLAKILNMSSGRCWSSDTYNPVPGVMDGVPSANNYQGGFGTTLMAKDLGLAQDSATSTKSPILLGSLAHQIYRMMCAKGYSKKDFSSVFQFLREEETF

SEQ ID NO: 756 - protein, 1462 aa, Homo sapiens
MGAQDRPQCHFDIEINREPVGRIMFQLFSDICPKTCKNFLCLCSGEKGLGKTTGKKLCYKGSTFHRVVKNFMIQGGDFSEGNGKGGESIYGGYFKDENFILKHDRAFLLSMANRGKHTNGSQFFITTKPAPHLDGVHVVFGLVISGFEVIEQIENLKTDAASRPYADVRVIDCGVLATKSIKDVFEKKRKKPTHSEGSDSSSNSSSSSESSSESELEHERSRRRKHKRRPKVKRSKKRRKEASSSEEPRNKHAMNPKGHSERSDTNEKRSVDSSAKREKPVVRPEEIPPVPENRFLLRRDMPVVTAEPEPKIPDVAPIVSDQKPSVSKSGRKIKGRGTIRYHTPPRSRSCSESDDDDSSETPPHWKEEMQRLRAYRPPSGEKWSKGDKLSDPCSSRWDERSLSQRSRSWSYNGYYSDLSTARHSGHHKKRRKEKKVKHKKKGKKQKHCRRHKQTKKRRILIPSDIESSKSSTRRMKSSCDRERSSRSSSLSSHHSSKRDWSKSDKDVQSSLTHSSRDSYRSKSHSQSYSRGSSRSRTASKSSSHSRSRSKSRSSSKSGHRKRASKSPRKTASQLSENKPVKTEPLRATMAQNENVVVQPVVAENIPVIPLSDSPPPSRWKPGQKPWKPSYERIQEMKAKTTHLLPIQSTYSLANIKETGSSSSYHKREKNSESDQSTYSKYSDRSSESSPRSRSRSSRSRSYSRSYTRSRSLASSHSRSRSPSSRSHSRNKYSDHSQCSRSSSYTSISSDDGRRAKRRLRSSGKKNSVSHKKHSSSSEKTLHSKYVKGRDRSSCVRKYSESRSSLDYSSDSEQSSVQATQSAQEKEKQGQMERTHNKQEKNRGEEKSKSERECPHSKKRTLKENLSDHLRNGSKPKRKNYAGSKWDSESNSERDVTKNSKNDSHPSSDKEEGEATSDSESEVSEIHIKVKPTTKSSTNTSLPDDNGAWKSSKQRTSTSDSEGSCSNSENNRGKPQKHKHGSKENLKREHTKKVKEKLKGKKDKKHKAPKRKQAFHWQPPLEFGEEEEEEIDDKQVTQESKEKKVSENNETIKDNILKTEKSSEEDLSGKHDTVTVSSDLDQFTKDDSKLSISPTALNTEENVACLQNIQHVEESVPNGVEDVLQTDDNMEICTPDRSSPAKVEETSPLGNARLDTPDINIVLKQDMATEHPQAEVVKQESSMSESKVLGEVGKQDSSSASLASAGESTGKKEVAEKSQINLIDKKWKPLQGVGNLAAPNAATSSAVEVKVLTTVPEMKPQGLRIEIKSKNKVRPGSLFDEVRKTARLNRRPRNQESSSDEQTPSRDDDSQSRSPSRSRSKSETKSRHRTRSVSYSHSRSRSRSSTSSYRSRSYSRSRSRGWYSRGRTRSRSSSYRSYKSHRTSSRSRSRSSSYDPHSRSRSYTYDSYYSRSRSRSRSQRSDSYHRGRSYNRRSRSCRSYGSDSESDRSYSHHRSPSESSRYS

SEQ ID NO: 757 - protein, 379 aa, Homo sapiens
AAAAAAAAAAAAAGVGGERSSRPAPSVAPEPDGCPVCVWRQHSRELRLESIKSQILSKLRLKEAPNISREVVKQLLPKAPPLQQILDLHDFQGDALQPEDFLEEDEYHATTETVISMAQETDPAVQTDGSPLCCHFHFSPKVMFTKVLKAQLWVYLRPVPRPATVYLQILRLKPLTGEGTAGGGGGGRRHIRIRSLKIELHSRSGHWQSIDFKQVLHSWFRQPQSNWGIEINAFDPSGTDLAVTSLGPGAEGLHPFMELRVLENTKRSRRNLGLDCDEHSSESRCCRYPLTVDFEAFGWDWIIAPKRYKANYCSGQCEYMFMQKYPHTHLVQQANPRGSAGPCCTPTKMSPINMLYFNDKQQIIYGKIPGMVVDRCGCS

SEQ ID NO: 758 - protein, 886 aa, Homo sapiens [sequence omitted]

SEQ ID NO: 759 - protein, 377 aa, Homo sapiens
MAAAAQSRVVRVLSMSRSAITAIATSVCHGPPCRQLHHALMPHGKGGRSSVSGIVATVFGATGFLGRYVVNHLGRMGSQVIIPYRCDKYDIMHLRPMGDLGQLLFLEWDARDKDSIRRVVQHSNVVINLIGRDWETKNFDFEDVFVKIPQAIAQLSKEAGVEKFIHVSHLNANIKSSSRYLRNKAVGEKVVRDAFPEAIIVKPSDIFGREDRFLNSFASMHRFGPIPLGSLGWKTVKQPVYVVDVSKGIVNAVKDPDANGKSFAFVGPSRYLLFHLVKYIFAVAHRLFLPFPLPLFAYRWVARVFEISPFEPWITRDKVERMHITDMKLPHLPGLEDLGIQATPLELKAIEVLRRHRTYRWLSAEIEDVKPAKTVNI

SEQ ID NO: 760 - protein, 1310 aa, Homo sapiens
TFHRTKSSGWPPPSGTWGLSQVPPYGWEMTANRDGRDYFINHMTQAIPFDDPRLESCQIIPPAPRKVEMRRDPVLGFGFVAGSEKPVVVRSVTPGGPSEGKLIPGDQIVMINDEPVSAAPRERVIDLVRSCKESILLTVIQPYPSPKSAFISAAKKARLKSNPVKVRFSEEVIINGQVSETVKDNSLLFMPNVLKVYLENGQTKSFRFDCSTSIKDVILTLQEKLSIKGIEHFSLMLEQRTEGAGTKLLLLHEQETLTQVTQRPSSHKMRCLFRISFVPKDPIDLLRRDPVAFEYLYVQSCNDVVQERFGPELKYDIALRLAALQMYIATVTTKQTQKISLKYIEKEWGLETFLPSAVLQSMKEKNIKKALSHLVKANQNLVPPGKKLSALQAKVHYLKFLSDLRLYGGRVFKATLVQAEKRSEVTLLVGPRYGISHVINTKTNLVALLADFSHVNRIEMFSEEESLVRVELHVLDVKPITLLMESSDAMNLACLTAGYYRLLVDSRRSIFNMANKKNTATQETGPENKGKHNLLGPDWNCIPQMTTFIGEGEQEAQITYIDSKQKTVEITDSTMCPKEHRHLYIDNAYSSDGLNQQLSQPGEAPCEADYRSLAQRSLLTLSGPETLKKAQESPRGAKVSFIFGDFALDDGISPPTLGYETLLDEGPEMLEKQRNLYIGSANDMKGLDLTPEAEGIQFVENSVYANIGDVKSFQAAEGIEEPLLHDICYAENTDDAEDEDEVSCEEDLVVGEMNQPAILNLSGSSDDIIDLTSLPPPEGDDNEDDFLLRSLNMAIAAPPPGFRDSSDEEDSQSQAASFPEDKEKGSSLQNDEIPVSLIDAVPTSAEGKCEKGLDNAVVSTLGALEALSVSEEQQTSDNSGVAILRAYSPESSSDSGNETNSSEMTESSELATAQKQSENLSRMFLATHEGYHPLAEEQTEFPASKTPAGGLPPKSSHALAARPATDLPPKVVPSKQLLHSDHMEMEPETMETKSVTDYFSKLHMGSVAYSCTSKRKSKLADGEGKAPPNGNTTGKKQQGTKTAEMEEEASGKFGTVSSRDSQHLSTFNLERTAFRKDSQRWYVATEGGMAEKSGLEAATGKTFPRASGLGAREAEGKEEGAPDGETSDGSGLGQGDRFLTDVTCASSAKDLDNPEDADSSTCDHPSKLPEADESVARLCDYHLAKRMSSLQSEGHFSLQSSQGSSVDAGCGTGSSGSACATPVESPLCPSLGKHLIPDASGKGVNYIPSEERAPGLPNHGATFKELHPQTEGMCPRMTVPALHTAINTEPLFGTLRDGCHRLPKIKETTV

SEQ ID NO: 761 - protein, 325 aa, Homo sapiens
RNEGCQNLARRNLSRDNRQENYGSAFPQGGENRNENEESTSKAETSEDSASRGETTGRSQKEFGEKRDQEGKTGERQQKNPEEKTRKEKRDSGPAIGKDKKTITGERGPREKGKGLGRSFSLSSNFTTPEEVPTGTKSHRCDECGKCFTRSSSLIRHKIIHTGEKPYECSECGKAFSLNSNLVLHQRIHTGEKPHECNECGKAFSHSSNLILHQRIHSGEKPYECNECGKAFSQSSDLTKHQRIHTGEKPYECSECGKAFNRNSYLILHRRIHTREKPYKCTKCGKAFTRSSTLTLHHRIHARERASEYSPASLDAFGAFLKSCV

SEQ ID NO: 762 - protein, 570 aa, Homo sapiens
MAARRRRSTGGGRARALNESKRVNNGNTAPEDSSPAKKTRRCQRQESKKMPVAGGKANKDRTEDKQDESVKALLLKGKAPVDPECTAKVGKAHVYCEGNDVYDVMLNQTNLQFNNNKYYLIQLLEDDAQRNFSVWMRWGRVGKMGQHSLVACSGNLNKAKEIFQKKFLDKTKNNWEDREKFEKVPGKYDMLQMDYATNTQDEEETKKEESLKSPLKPESQLDLRVQELIKLICNVQAMEEMMMEMKYNTKKAPLGKLTVAQIKAGYQSLKKIEDCIRAGQHGRALMEACNEFYTRIPHDFGLRTPPLIRTQKELSEKIQLLEALGDIEIAIKLVKTELQSPEHPLDQHYRNLHCALRPLDHESYEFKVISQYLQSTHAPTHSDYTMTLLDLFEVEKDGEKEAFREDLHNRMLLWHGSRMSNWVGILSHGLRIAPPEAPITGYMFGKGIYFADMSSKSANYCFASRLKNTGLLLLSEVALGQCNELLEANPKAEGLLQGKHSTKGLGKMAPSSAHFVTLNGSTVPLGPASDTGILNPDGYTLNYNEYIVYNPNQVRMRYLLKVQFNFLQLW

SEQ ID NO: 763 - protein, 380 aa, Homo sapiens
KAAAIGIDLGTTYSCVGVFQHGKVEIIANDQGNRTTPSYVAFTDTERLIGDAAKNQVALNPQNTVFDAKRLIGRKFGDPVVQSDMKHWPFQVINDGDKPKVQVSYKGETKAFYPEEISSMVLTKMKEIAEAYLGYPVTNAVITVPAYFNDSQRQATKDAGVIAGLNVLRIINEPTAAAIAYGLDRTGKGERNVLIFDLGGGTFDVSILTIDDGIFEVKATAGDTHLGGEDFDNRLVNHFVEEFKRKHKKDISQNKRAVRRLRTACERAKRTLSSSTQASLEIDSLFEGIDFYTSITRARFEELCSDLFRSTLEPVEKALRDAKLDKAQIHDLVLVGGSTRIPKVQKLLQDFFNGRDLNKSINPDEAVAYGAAVQAAILMG

SEQ ID NO: 764 - protein, 363 aa, Homo sapiens [sequence omitted]

SEQ ID NO: 765 - protein, 411 aa, Homo sapiens
FVLPTAACQDAEQPTRYETLFQALDRNGDGVVDIGELQEGLRNLGIPLGQDAEEKIFTTGDVNKDGKLDFEEFMKYLKDHEKKMKLAFKSLDKNNDGKIEASEIVQSLQTLGLTISEQQAELILQSIDVDGTMTVDWNEWRDYFLFNPVTDIEEIIRFWKHSTGIDIGDSLTIPDEFTEDEKKSGQWWRQLLAGGIAGAVSRTSTAPLDRLKIMMQVHGSKSDKMNIFGGFRQMVKEGGIRSLWRGNGTNVIKIAPETAVKFWAYEQYKKLLTEEGQKIGTFERFISGSMAGATAQTFIYPMEVMKTRLAVGKTGQYSGIYDCAKKILKHEGLGAFYKGYVPNLLGIIPYAGIDLAVYELLKSYWLDNFAKDSVNPGVMVLLGCGALSSTCGQLASYPLALVRTRMQAQAC

SEQ ID NO: 766 - protein, 393 aa, Homo sapiens
MAKSPENSTLEEILGQYQRSLREHASRSIHQLTCALKEGDVTIGEDAPNLSFSTSVGNEDARTAWPELQQSHAVNQLKDLLRQQADKESEVSPSRRRKMSPLRSLEHEETNMPTMHDLVHTINDQSQYIHHLEAEVKFCKEELSGMKNKIQVVVLENEGLQQQLKSQRQEETLREQTLLDASGNMHNSWITTGEDSGVGETSKRPFSHDNADFGKAASAGEQLELEKLKLTYEEKCEIEESQLKFLRNDLAEYQRTCEDLKEQLKHKEFLLAANTCNRVGGLCLKCAQHEAVLSQTHTNVHMQTIERLVKERDDLMSALVSVRSSLADTQQREASAYEQVKQVLQISEEANFEKTKALIQCDQLRKELERQAERLEKELASQQEKRAIEKDMM

SEQ ID NO: 767 - protein, 2011 aa, Homo sapiens
ARGGDEDDDDDGSEMELDEDYPDMNASPLVRFERFDREDDLIIEFDNMFSSATDIPPSPGNIPTTHPLMVRHADYSSLTLGSGSSTTRLTQGIGRSQRTLRQLTANTGHTIHVHYPGNRQPNPPLILQRLLGPSAAADILQLSSSLPLQSRGRARLLVGNDDVHIIARSDDELLDDFFHDQSTATSQAGTLSSIPTALTRWTEECKVLDAESMHDCVSVVKVSIVNHLEFLRDEELEERREKRRKQLAEEETKITDKGKEDKENRDQSAQCTASKSNDSTEQNLSDGTPMPDSYPTTPSSTDAATSESKETLGTLQSSQQQPTLPTPPALGEVPQELQSPAGEGGSSTQLLMPVEPEELGPTRPSGEAETTQMELSPAPTITSLSPERAEDSDALTAVSSQLEGSPMDTSSLASCTLEEAVGDTSAAGSSEQPRAGSSTPGDAPPAVAEVQGRSDGSGESAQPPEDSSPPASSESSSTRDSAVAISGADSRGILEEPLPSTSSEEEDPLAGISLPEGVDPSFLAALPDDIRREVLQNQLGIRPPTRTAPSTNSSAPAVVGNPGVTEVSPEFLAALPPAIQEEVLAQQRAEQQRRELAQNASSDTPMDPVTFIQTLPSDLRRSVLEDMEDSVLAVMPPDIAAEAQALRREQEARQRQLMHERLFGHSSTSALSAILRSPAFTSRLSGNRGVQYTRLAVQRGGTFQMGGSSSHNRPSGSNVDTLLRLRGRLLLDHEALSCLLVLLFVDEPKLNTSRLHRVLRNLCYHAQTRHWVIRSLLSILQRSSESELCIETPKLTTSEEKGKKSSKSCGSSSHENRPLDLLHKMESKSSNQLSWLSVSMDAALGCRTNIFQIQRSGGRKHTEKHASGGSTVHIHPQAAPVVCRHVLDTLIQLAKVFPSHFTQQRTKETNCESDRERGNKACSPCSSQSSSSGICTDFWDLLVKLDNMNVSRKGKNSVKSVPVSAGGEGETSPYSLEASPLGQLMNMLSHPVIRRSSLLTEKLLRLLSLISIALPENKVSEAQANSGSGASSTTTATSTTSTTTTTAASTTPTPPTAPTPVTSAPALVAATAISTIVVAASTTVTTPTTATTTVSISPTTKGSKSPAKVSDGGSSSTDFKMVSSGLTENQLQLSVEVLTSHSCSEEGLEDAANVLLQLSRGDSGTRDTVLKLLLNGARHLGYTLCKQIGTLLAELREYNLEQQRRAQCETLSPDGLPEEQPQTTKLKGKMQSRFDMAENVVIVASQKRPLGGRELQLPSMSMLTSKTSTQKFFLRVLQVIIQLRDDTRRANKKAKQTGRLGSSGLGSASSIQAAVRQLEAEADAIIQMVREGQRARRQQQAATSESSQSEASVRREESPMDVDQPSPSAQDTQSIASDGTPQGEKEKEERPPELPLLSEQLSLDELWDMLGECLKELEESHDQHAVLVLQPAVEAFFLVHATERESKPPVRDTRESQLAHIKDEPPPLSPAPLTPATPSSLDPFFSREPSSMHISSSLPPDTQKFLRFAETHRTVLNQILRQSTTHLADGPFAVLVDYIRVLDFDVKRKYFRQELERLDEGLRKEDMAVHVRRDHVFEDSYRELHRKSPEEMKNRLYIVFEGEEGQDAGGLLREWYMIISREMFNPMYALFRTSPGDRVTYTINPSSHCNPNHLSYFKFVGRIVAKAVYDNRLLECYFTRSFYKHILGKSVRYTDMESEDYHFYQGLVYLLENDVSTLGYDLTFSTEVQEFGVCEVRDLKPNGANILVTEENKKEYVHLVCQMRMTGAIRKQLAAFLEGFYEIIPKRLISIFTEQELELLISGLPTIDIDDLKSNTEYHKYQSNSIQIQWFWRALRSFDQADRAKFLQFVTGTSKVPLQGFAALEGMNGIQKFQIHRDDRSTDRLPSAHTCFNQLDLPAYESFEKSATCYCWLSRSALKALGWPNKALPNSVGFFLPLLDLGRGELKKEPERNCQKPINEIHQLTVCVPAAPSSPAHTCSSSHSLPAACFLTFSPLSMPSMIPTPCVLKRQ

SEQ ID NO: 768 - protein, 342 aa, Homo sapiens [sequence omitted]

SEQ ID NO: 769 - protein, 21 aa, Homo sapiens
SPNQTSLYFCASRTQGHEQYF

SEQ ID NO: 770 - protein, 214 aa, Homo sapiens
MGLAGVCALRRSAGYILVGGAGGQSAAAAARRCSEGEWASGGVRSFSRAAAAMAPIKVGDAIPAVEVFEGEPGNKVNLAELFKGKKGVLFGVPGAFTPGCSKTHLPGFVEQAEALKAKGVQVVACLSVNDAFVTGEWGRAHKAEGKVRLLADPTGAFGKETDLLLDDSLVSIFGNRRLKRFSMVVQDGIVKALNVEPDGTGLTCSLAPNIISQL

SEQ ID NO: 771 - protein, 1376 aa, Homo sapiens
MALKNINYLLIFYLSFSLLIYIKNSFCNKNNTRCLSNSCQNNSTCKDFSKDNDCSCSDTANNLDKDCDNMKDPCFSNPCQGSATCVNTPGERSFLCKCPPGYSGTICETTIGSCGKNSCQHGGICHQDPIYPVCICPAGYAGRFCEIDHDECASSPCQNGAVCQDGIDGYSCFCVPGYQGRHCDLEVDECASDPCKNEATCLNEIGRYTCICPHNYSGVNCELEIDECWSQPCLNGATCQDALGAYFCDCAPGFLGDHCELNTDECASQPCLHGGLCVDGENRYSCNCTGSGFTGTHCETLMPLCWSKPCHNNATCEDSVDNYTCHCWPGYTGAQCEIDLNECNSNPCQSNGECVELSSEKQYGRITGLPSSFSYHEASGYVCICQPGFTGIHCEEDVNECSSNPCQNGGTCENLPGNYTCHCPFDNLSRTFYGGRDCSDILLGCTHQQCLNNGTCIPHFQDGQHGFSCLCPSGYTGSLCEIATTLSFEGDGFLWVKSGSVTTKGSVCNIALRFQTVQPMALLLFRSNRDVFVKLELLSGYIHLSIQVNNQSKVLLFISHNTSDGEWHFVEVIFAEAVTLTLIDDSCKEKCIAKAPTPLESDQSICAFQNSFLGGLPVGMTSNGVALLNFYNMPSTPSFVGCLQDIKIDWNHITLENISSGSSLNVKAGCVRKDWCESQPCQSRGRCINLWLSYQCDCHRPYEGPNCLREYVAGRFGQDDSTGYVIFTLDESYGDTISLSMFVRTLQPSGLLLALENSTYQYIRVWLERGRLAMLTPNSPKLVVKFVLNDGNVHLISLKIKPYKIELYQSSQNLGFISASTWKIEKGDVIYIGGLPDKQETELNGGFFKGCIQDVRLNNQNLEFFPNPTNNASLNPVLVNVTQGCAGDNSCKSNPCHNGGVCHSRWDDFSCSCPALTSGKACEEVQWCGFSPCPHGAQCQPVLQGFECIANAVFNGQSGQILFRSNGNITRELTNITFGFRTRDANVIILHAEKEPEFLNISIQDSRLFFQLQSGNSFYMLSLTSLQSVNDGTWHEVTLSMTDPLSQTSRWQMEVDNETPFVTSTIATGSLNFLKDNTDIYVGDRAIDNIKGLQGCLSTIEIGGIYLSYFENVHGFINKPQEEQFLKISTNSVVTGCLQLNVCNSNPCLHGGNCEDIYSSYHCSCPLGWSGKHCELNIDECFSNPCIHGNCSDRVAAYHCTCEPGYTGVNCEVDIDNCQSHQCANGATCISHTNGYSCLCFGNFTGKFCRQSRLPSTVCGNEKTNLTCYNGGNCTEFQTELKCMCRPGFTGEWCEKDIDECASDPCVNGGLCQDLLNKFQCLCDVAFAGERCEVDVSSLSFYVSLLFWQNLFQLLSYLILRMNDEPVVEWGEQEDY

SEQ ID NO: 772 - protein, 328 aa, Homo sapiens
MRPVRLMKVFVTRRIPAEGRVALARAADCEVEQWDSDEPIPAKELERGVAGAHGLLCLLSDHVDKRILDAAGANLKVISTMSVGIDHLALDEIKKRGIRVGYTPDVLTDTTAELAVSLLLTTCRRLPEAIEEVKNGGWTSWKPLWLCGYGLTQSTVGIIGLGRIGQAIARRLKPFGVQRFLYTGRQPRPEEAAEFQAEFVSTPELAAQSDFIVVACSLTPATEGLCNKDFFQKMKETAVFINISRGDVVNQDDLYQALASGKIAAAGLDVTSPEPLPTNHPLLTLKNCVILPHIGSATHRTRNTMSLLAANNLLAGLRGEPMPSELKL

SEQ ID NO: 773 - protein, 294 aa, Homo sapiens
MEYPAPATVQAADGGAAGPYSSSELLEGQEPDGVRFDRERARRLWEAVSGAQPVGREEVEHMIQKNQCLFTNTQCKVCCALLISESQKLAHYQSKKHANKVKRYLAIHGMETLKGETKKLDSDQKSSRSKDKNQCCPICNMTFSSPVVAQSHYLGKTHAKNLKLKQQSTKVEALHQNREMIDPDKFCSLCHATFNDPVMAQQHYVGKKHRKQETKLKLMARYGRLADPAVTDFPAGKGYPCKTCKIVLNSIEQYQAHVSGFKHKNQSPKTVASSLGQIPMQRQPIQKDSTTLED

SEQ ID NO: 774 - protein, 739 aa, Homo sapiens
MASILLRSCRGRAPARLPPPPRYTVPRGSPGDPAHLSCASTLGLRNCLNVPFGCCTPIHPVYTSSRGDHLGCWALRPECLRIVSRAPWTSTSVGFVAVGPQCLPVRGWHSSRPVRDDSVVEKSLKSLKDKNKKLEEGGPVYSPPAEVVVKKSLGQRVLDELKHYYHGFRLLWIDTKIAARMLWRILNGHSLTRRERRQFLRICADLFRLVPFLVFVVVPFMEFLLPVAVKLFPNMLPSTFETQSLKEERLKKELRVKLELAKFLQDTIEEMALKNKAAKGSATKDFSVFFQKIRETGERPSNEEIMRFSKLFEDELTLDNLTRPQLVALCKLLELQSIGTNNFLRFQLTMRLRSIKADDKLIAEEGVDSLNVKELQAACRARGMRALGVTEDRLRGQLKQWLDLHLHQEIPTSLLILSRAMYLPDTLSPADQLKSTLQTLPEIVAKEAQVKVAEVEGEQVDNKAKLEATLQEEAAIQQEHREKELQKRSEVAKDFEPERVVAAPQRPGTEPQPEMPDTVLQSETLKDTAPVLEGLKEEEITKEEIDILSDACSKLQEQKKSLTKEKEELELLKEDVQDYSEDLQEIKKELSKTGEEKYVEESKASKRLTKRVQQMIGQIDGLISQLEMDQQAGKLAPANGMPTGENVISVAELINAMKQVKHIPESKLTSLAAALDENKDGKVNIDDLVKVIELVDKEDVHISTSQVAEIVATLEKEEKVEEKEKAKEKAEKEVAEVKS

SEQ ID NO: 775 - protein, 739 aa, Homo sapiens; identical to SEQ ID NO: 774

SEQ ID NO: 776 - protein, 1086 aa, Homo sapiens
  VARIANT 386: Xaa = Any Amino Acid
MANLLKTVVTGCSCPLLSNLGSCKGLRVKKDFLRTFYTHQELWCKAPVKPGIPYKQLTVGVPKEIFQNEKRVALSPAGVQNLVKQGFNVVVESGAGEASKFSDDHYRVAGAQIQGAKEVLASDLVVKVRAPMVNPTLGVHEADLLKTSGTLISFIYPAQNPELLNKLSQRKTTVLTMDQVPRVTIAQGYDALSSMANIAGYKAVVLAANHFGRFFTGQITAAGKVPPAKILIVGGGVAGLASAGAAKSMGAIVRGFDTRAAALEQFKSLGAEPLEVDLKESGEGQGGYAKEMSKEFIEAEMKLFAQQCKEVDILISTALIPGKKAPVLFNKEMIESMKEGSVVVDLAAEAGGNFETTKPGELYIHKGITHIGYTDLPSRMATQASXLYSNNITKLLKAISPDKDNFYFDVKDDFDFGTMGHVIRGTVVMKDGKVIFPAPTPKNIPQGAPVKQKTVAELEAEKAATITPFRKTMSTASAYTAGLTGILGLGIAAPNLAFSQMVTTFGLAGIVGYHTVWGVTPALHSPLMSVTNAISGLTAVGGLALMGGHLYPSTTSQGLAALAAFISSVNIAGGFLVTQRMLDMFKRPTDPPEYNYLYLLPAGTFVGGYLAALYSGYNIEQIMYLGSGLCCVGALAGLSTQGTARLGNALGMIGVAGGLAATLGVLKPGPELLAQMSGAMALGGTIGLTIAKRIQISDLPQLVAAFHSLVGLAAVLTCIAEYIIEYPHFATDAAANLTKIVAYLGTYIGGVTFSGSLIAYGKLQGLLKSAPLLLPGRHLLNAGLLAASVGGIIPFMVDPSFTTGITCLGAVSALSAVMGVTLTPAIGGADMPVVITVLNSYSGWALCAEGFLLNNNLLTIVGALIGSSGAILSYIMCVAMNRSLANVILGGYGTTSTAGGKPMEISGTHTEINLDNAIDMIREANSIIITPGYGLCAAKAQYPIADLVKMLTEQGKKVRFGIHPVAGRMPGQLNVLLAEAGVPYDIVLEMDEINHDFPDTDLVLVIGANDTVNSAAQEDPNSIIAGMPVLEVWKSKQVIVMKRSLGVGYAAVDNPIFYKPNTAMLLGDAKKTCDALQAKVRESYQK

SEQ ID NO: 777 - protein, 1086 aa, Homo sapiens; identical to SEQ ID NO: 776
  VARIANT 386: Xaa = Any Amino Acid

SEQ ID NO: 778 - protein, 410 aa, Homo sapiens
METSSPRPPRPSSNPGLSLDARLGVDTRLWAKVLFTALYALIWALGAAGNALSVHVVLKARAGRAGRLRHHVLSLALAGLLLLLVGVPVELYSFVWFHYPWVFGDLGCRGYYFVHELCAYATVLSVAGLSAERCLAVCQPLRARSLLTPRRTRWLVALSWAASLGLALPMAVIMGQKHELETADGEPEPASRVCTVLVSRTALQVFIQVNVLVSFVLPLALTAFLNGVTVSHLLALCSQVPSTSTPGSSTPSRLELLSEEGLLSFIVWKKTFIQGGQVSLVRHKDVRRIRSLQRSVQVLRAIVVMYVICWLPYHARRLMYCYVPDDAWTDPLYNFYHYFYMVTNTLFYVSSAVTPLLYNAVSSSFRKLFLEAVSSLCGEHHPMKRLPPKPQSPTLMDTASGFGDPPETRT

SEQ ID NO: 779 - protein, 310 aa, Homo sapiens
MRPLQIVPSRLISQLYCGLKPPASTRNQICLKMARPSSSMADFRKFFAKAKHIVIISGAGVSAESGVPTFRGAGGYWRKWQAQDLATPLAFAHNPSRVWEFYHYRREVMGSKEPNAGHRAIAECETRLGKQGRRVVVITQNIDELHRKAGTKNLLEIHGSLFKTRCTSCGVVAENYKSPICPALSGKGAPEPGTQDASIPVEKLPRCEEAGCGGLLRPHVVWFGENLDPAILEEVDRELAHCDLCLVVGTSSVVYPAAMFAPQVAARGVPVAEFNTETTPATNRFRFHFQGPCGTTLPEALACHENETVS

SEQ ID NO: 780 - protein, 89 aa, Homo sapiens
MAAQIPESDQIKQFKEFLGTYNKLTETCFLDCVKDFTTREVKPEETTCSEHCLQKYLKMTQRISMRFQEYHIQQNEALAAKAGLLGQPR

SEQ ID NO: 781 - protein, 89 aa, Homo sapiens; identical to SEQ ID NO: 780

SEQ ID NO: 782 - protein, 478 aa, Homo sapiens
KCKVVITFNQGLRGGRVVELKKIVDEAVKHCPTVQHVLVAHRTDNKVHMGDLDVPLEQEMAKEDPVCAPESMGSEDMLFMLYTSGSTGMPKGIVHTQAGYLLYAALTHKLVFDHQPGDIFGCVADIGWITGHSYVVYGPLCNGATSVLFESTPVYPNAGRYWETVERLKINQFYGAPTAVRLLLKYGDAWVKKYDRSSLRTLGSVGEPINCEAWEWLHRVVGDSRCTLVDTWWQTETGGICIAPRPSEEGAEILPAMAMRPFFGIVPVLMDEKGSVVEGSNVSGALCISQAWPGMARTIYGDHQRFVDAYFKAYPGYYFTGDGAYRTEGGYYQITGRMDDVINISGHRLGTAEIEDAIADHPAVPESAVIGYPHDIKGEAAFAFIVVKDSAGDSDVVVQELKSMVATKIAKYAVPDEILVVKRLPKTRSGKVMRRLLRKIITSEAQELGDTTTLEDPSIIAEILSVYQKCKDKQAAAK

SEQ ID NO: 783 - protein, 478 aa, Homo sapiens; identical to SEQ ID NO: 782

SEQ ID NO: 784 - protein, 383 aa, Homo sapiens
WFFKGISRKDAERQLLAPGNMLGSFMIRDSETTKGSYSLSVRDYDPRQGDTVKHYKIRTLDNGGFYISPRSTFSTLQELVDHYKKGNDGLCQKLSVPCMSSKPQKPWEKDAWEIPRESLKLEKKLGAGQFGEVWMATYNKHTKVAVKTMKPGSMSVEAFLAEANVMKTLQHDKLVKLHAVVTKEPIYIITEFMAKGSLLDFLKSDEGSKQPLPKLIDFSAQIAEGMAFIEQRNYIHRDLRAANILVSASLVCKIADFGLARVIEDNEYTAREGAKFPIKWTAPEAINFGSFTIKSDVWSFGILLMEIVTYGRIPYPGMSNPEVIRALERGYRMPRPENCPEELYNIMMRCWKNRPEERPTFEYIQSVLDDFYTATESQYQQQP

SEQ ID NO: 785 - protein, 225 aa, Homo sapiens
MDLRAGDSWGMLACLCTVLWHLPAVPALNRTGDPGPGPSIQKTYDLTRYLEHQLRSLAGTYLNYLGPPFNEPDFNPPRLGAETLPRATVDLEVWRSLNDKLRLTQNYEAYSHLLCYLRGLNRQAATAELRRSLAHFCTSLQGLLGSIAGVMAALGYPLPQPLPGTEPTWTPGPAHSDFLQKMDDFWLLKELQTWLWRSAKDFNRLKKKMQPPAAAVTLHLGAHGF

SEQ ID NO: 786 - protein, 172 aa, Homo sapiens
MVGPAPRRRLRPLAALALVLALAPGLPTARAGQTPRPAERGPPVRLFTEEELARYGGEEEDQPIYLAVKGVVFDVTSGKEFYGRGAPYNALTGKDSTRGVAKMSLDPADLTHDTTGLTAKELEALDEVFTKVYKAKYPIVGYTARRILNEDGSPNLDFKPEDQPHFDIKDEF

SEQ ID NO: 787 - protein, 207 aa, Homo sapiens
MNVTPEVKSRGMKFAEEQLLKHGWTQGKGLGRKENGITQALRVTLKQDTHGVGHDPAKEFTNHWWNELFNKTAANLVVETGQDGVQIRSLSKETTRYNHPKPNLLYQKFVKMATLTSGGEKPNKDLESCSDDDNQGSKSPKILTDEMLLQACEGRTAHKAARLGITMKAKLARLEAQEQAFLARLKGQDPGAPQLQSESKPPKKKKK

SEQ ID NO: 788 - protein, 206 aa, Homo sapiens
MAAAVLGQLGALWIHNLRSRGKLALGVLPQSYIHTSASLDISRKWEKKNKIVYPPQLPGEPRRPAEIYHCRRQIKYSKDKMWYLAKLIRGMSIDQALAQLEFNDKKGAKIIKEVLLEAQDMAVRDHNVEFRSNLYIAESTSGRGQCLKRIRYHGRGRFGIMEKVYCHYFVKLVEGPPPPPEPPKTAVAHAKEYIQQLRSRTIVHTL

SEQ ID NO: 789 - protein, 343 aa, Homo sapiens [sequence omitted]

SEQ ID NO: 790 - protein, 294 aa, Homo sapiens
MVVLFYWNNHESQVLKSLVICLVAMEERFFLHVLSSSRSILEDPPSISEGCGGRVTDYRITVVPLASVIVKESLTEEDVLNCQKTIYNLVDMERKNDPLPISTVGTRGKGPKRDEQYRIMWNELETLVRAHINNSEKHQRVLECLMACRSKPPEEEERKKRGRKREDKEDKSEKAVKDYEQEKSWQDSERLKGILERGKEELAEAEIIKDSPDSPEPPNKKPLVEMDETPQVEKSKGPVSLLSLWSNRINTANSRKHQEFAGRLNSVNNRAELYQHLKEENGMETTENGKASRQ

SEQ ID NO: 791 - protein, 441 aa, Homo sapiens [sequence omitted]

SEQ ID NO: 792 - protein, 573 aa, Homo sapiens [sequence omitted]

SEQ ID NO: 793 - protein, 2242 aa, Homo sapiens
GEMALFECLVAGPTDVEVDWLCRGRLLQPALLKCKMHFDGRKCKLLLTSVHEDDSGVYTCKLSTAKDELTCSARLTVRPSLAPLFTRLLEDVEVLEGRAARFDCKISGTPPPVVTWTHFGCPMEESENLRLRQDGGLHSLHIAHVGSEDEGLYAVSAVNTHGQAHCSAQLYVEEPRTAASGPSSKLEKMPSIPEEPEQGELERLSIPDFLRPLQDLEVGLAKEAMLECQVTGLPYPTISWFHNGHRIQSSDDRRMTQYRDVHRLVFPAVGPQHAGVYKSVIANKLGKAACYAHLYVTDVVPGPPDGAPQVVAVTGRMVTLTWNPPRSLDMAIDPDSLTYTVQHQVLGSDQWTALVTGLREPGWAATGLRKGVQHIFRVLSTTVKSSSKPSPPSEPVQLLEHGPTLEEAPAMLDKPDIVYVVEGQPASVTVTFNHVEAQVVWRSCRGALLEARAGVYELSQPDDDQYCLRICRVSRRDMGALTCTARNRHGTQTCSVTLELAEAPRFESIMEDVEVGAGETARFAVVVEGKPLPDIMWYKDEVLLTESSHVSFVYEENECSLVVLSTGAQDGGVYTCTAQNLAGEVSCKAELAVHSAQTAMEVEGVGEDEDHRGRRLSDFYDIHQEIGRGAFSYLRRIVERSSGLEFAAKFIPSQAKPKASARREARLLARLQHDCVLYFHEAFERRRGLVIVTELCTEELLERIARKPTVCESEIRAYMRQVLEGIHYLHQSHVLHLDVKPENLLVWDGAAGEQQVRICDFGNAQELTPGEPQYCQYGTPEFVAPEIVNQSPVSGVTDIWPVGVVAFLCLTGISPFVGENDRTTLMNIRNYNVAFEETTFLSLSREARGFLIKVLVQDRLRPTAEETLEHPWFKTQAKGAEVSTDHLKLFLSRRRWQRSQISYKCHLVLRPIPELLRAPPERVWVTMPRRPPPSGGLSSSSDSEEEELEELPSVPRPLQPEFSGSRVSLTDIPTEDEALGTPETGAATPMDWQEQGRAPSQDQEAPSPEALPSPGQEPAAGASPRRGELRRGSSAESALPRAGPRELGRGLHKAASVELPQRRSPGPGATRLARGGLGEGEYAQRLQALRQRLLRGGPEDGKVSGLRGPLLESLGGRARDPRMARAASSEAAPHHQPPLENRGLQKSSSFSQGEAEPRGRHRRAGAPLEIPVARLGARRLQESPSLSALSEAQPSSPARPSAPKPSTPKSAEPSATTPSDAPQPPAPQPAQDKAPEPRPEPVRASKPAPPPQALQTLALPLTPYAQIIQSLQLSGHAQGPSQGPAAPPSEPKPHAAVFARVASPPPGAPEKRVPSAGGPPVLAEKARVPTVPPRPGSSLSSSIENLESEAVFEAKFKRSRESPLSLGLRLLSRSRSEERGPFRGAEEEDGIYRPSPAGTPLELVRRPERSRSVQDLRAVGEPGLVRRLSLSLSQRLRRTPPAQRHPAWEARGGDGESSEGGSSARGSPVLAMRRRLSFTLERLSSRLQRSGSSEDSGGASGRSTPLFGRLRRATSEGESLRRLGLPHNQLAAQAGATTPSAESLGSEASATSGSSAPGESRSRLRWGFSRPRKDKGLSPPNLSASVQEELGHQYVRSESDFPPVFHIKLKDQVLLEGEAATLLCLPAACPAPHISWMKDKKSLRSEPSVIIVSCKDGRQLLSIPRAGKRHAGLYECSATNVLGSITSSCTVAVARVPGKLAPPEVTQTYQDTALVLWKPGDSRAPCTYTLERRVDGESVWHPVSSGIPDCYYNVTHLPVGVTVRFRVACANRAGQGPFSNSSEKVFVRGTQDSSAVPSAAHQEAPVTSRPARARPPDSPTSLAPPLAPAAPTPPSVTVSPSSPPTPPSQALSSLKAVGPPPQTPPRRHRGLQAARPAEPTLPSTHVTPSEPKPFVLDTGTPIPASTPQGVKPVSSSTPVYVVTSFVSAPPAPEPPAPEPPPEPTKVTVQSLSPAKEVVSSPGSSPRSSPRPEGTTLRQGPPQKPYTFLEEKARGRFGVVRACRENATGRTFVAKIVPYAAEGKPRVLQEYEVLRTLHHERIMSLHEAYITPRYLVLIAESCGNRELLCGLSDRFRYSEDDVATYMVQLLQGLDYLHGHHVLHLDIKPDNLLLAPDNALKIVDFGSAQPYNPQALRPLGHRTGTLEFMAPEMVKGEPIGSATDIWGAGVLTYIMLSGRSPFYEPDPQETEARIVGGRFDAFQLYPNTSQSATLFLRKVLSVHPWSRPSSCLSVCHKEIKMASS

SEQ ID NO: 794 - protein, 1471 aa, Homo sapiens
NSEHTAVISLCSGMLGTFRSHDGDYFIEPLQSMDEQEDEEEQNKPHIIYRRSAPQREPSTGRHACDTSEHKNRHSKDKKKTRARKWGERINLAGDVAALNSGLATEAFSAYGNKTDNTREKRTHRRTKRFLSYPRFVEVLVVADNRMVSYHGENLQHYILTLMSIVASIYKDPSIGNLINIVIVNLIVIHNEQDGPSISFNAQTTLKNFCQWQHSKNSPGGIHHDTAVLLTRQDICRAHDKCDTLGLAELGTICDPYRSCSISEDSGLSTAFTIAHELGHVFNMPHDDNNKCKEEGVKSPQHVMAPTLNFYTNPWMWSKCSRKYITEFLDTGYGECLLNEPESRPYPLPVQLPGILYNVNKQCELIFGPGSQVCPYMMQCRRLWCNNVNGVHKGCRTQHTPWADGTECEPGKHCKYGFCVPKEMDVPVTDGSWGSWSPFGTCSRTCGGGIKTAIRECNRPEPKNGGKYCVGRRMKFKSCNTEPCLKQKRDFRDEQCAHFDGKHFNINGLLPNVRWVPKYSGILMKDRCKLFCRVAGNTAYYQLRDRVIDGTPCGQDTNDICVQGLCRQAGCDHVLNSKARRDKCGVCGGDNSSCKTVAGTFNTVHYGYNTVVRIPAGATNIDVRQHSFSGETDDDNYLALSSSKGEFLLNGNFVVTMAKREIRIGNAVVEYSGSETAVERINSTDRIEQELLLQVLSVGKLYNPDVRYSFNIPIEDKPQQFYWNSHGPWQACSKPCQGERKRKLVCTRESDQLTVSDQRCDRLPQPGHITEPCGTDCDLRWHVASRSECSAQCGLGYRTLDIYCAKYSRLDGKTEKVDDGFCSSHPKPSNREKCSGECNTGGWRYSAWTECSKSCDGGTQRRRAICVNTRNDVLDDSKCTHQEKVTIQRCSEFPCPQWKSGDWSECLVTCGKGHKHRQVWCQFGEDRLNDRMCDPETKPTSMQTCQQPECASWQAGPWGQCSVTCGQGYQLRAVKCIIGTYMSVVDDNDCNAATRPTDTQDCELPSCHPPPAAPETRRSTYSAPRTQWRFGSWTPCSATCGKGTRMRYVSCRDENGSVADESACATLPRPVAKEECSVTPCGQWKALDWSSCSVTCGQGRATRQVMCVNYSDHVIDRSECDQDYIPETDQDCSMSPCPQRTPDSGLAQHPFQNEDYRPRSASPSRTHVLGGNQWRTGPWGACSSTCAGGSQRRVVVCQDENGYTANDCVERIKPDEQRACESGPCPQWAYGNWGECTKLCGGGIRTRLVVCQRSNGERFPDLSCEILDKPPDREQCNTHACPHDAAWSTGPWSSCSVSCGRGHKQRNVYCMAKDGSHLESDYCKHLAKPHGHRKCRGGRCPKWKAGAWSQCSVSCGRGVQQRHVGCQIGTHKIARETECNPYTRPESERDCQGPRCPLYTWRAEEWQECTKTCGEGSRYRKVVCVDDNKNEVHGARCDVSKRPVDRESCSLQPCEYVWITGEWSEVPSWEL

SEQ ID NO: 795 - protein, 1265 aa, Homo sapiens
MWRPNNNLSKEKTEWHVEKSSGKLQAAMASVIVRPSSSTKTDSMPAMQLASKDRVSERSSAGAHKTDCLKLAEAGETGRIILPNVNSDSVHTKSEKNFQAVSQGSVPSSVMSAVNTMCNTKTDVITSAADTTSVSSWGGSEVISSLSNTILASTSSECVSSKSVSQPVAQKQECKVSTTAPVTLASSKTGSVVQPSSGFSGTTDFIHLKKHKAALAAAQYKSSNASETEPNAIKNQTLSASLPLDSTVICSTINKANSVGNGQASQTSQPNYHTKLKKAWLTRHSEEDKNTNKMENSGNSVSEIIKPCSVNLIASTSSDIQNSVDSKIIVDKYVKDDKVNRRKAKRTYESGSESGDSDESESKSEQRTKRQPKPTYKKKQNDLQKRKGEIEEDLKPNGVLSRSAKERSKLKLQSNSNTGIPRSVLKDWRKVKKLKQTGESFLQDDSCCEIGPNLQKCRECRLIRSKKGEEPAHSPVFCRFYYFRRLSFSKNGVVRIDGFSSPDQYDDEAMSLWTHENFEDDELDIETSKYILDIIGDKFCQLVTSEKTALSWVKKDAKIAWKRAVRGVREMCDACEATLFNIHWVCQKCGFVVCLDCYKAKERKSSRDKELYAWMKCVKGQPHDHKHLMPTQIIPGSVLTDLLDAMHTLREKYGIKSHCHCTNKQNLQVGNFPTMNGVSQVLQNVLNHSNKISLCMPESQQQNTPPKSEKNGGSSPESDVGTDNKLTPPESQSPLHWLADLAEQKAREEKKENKELTLENQIKEEREQDNSESPNGRTSPLVSQNNEQGSTLRDLLTTTAGKLRVGSTDAGIAFAPVYSMGAPSSKSGRTMPNILDDIIASVVENKIPPSKTSKINVKPELKEEPEESIISAVENNKLYSDIPHSWICEKHILWLKDYKNSSNWKLFKECWKQGQPAVVSGVHKKMNISLWKAESISLDFGDHQADLLNCKDSIISNANVKEFWDGFEEVSKRQKNKSGETVVLKLKDWPSGEDFKTMMPARYEDLLKSLPLPEYCNPEGKFNLASHLPGFFVRPDLGPRLCSAYGVVAAKDHDIGTTNLHIEVSDVVNILVYVGIAKGNGILSKAGILKKFEEEDLDDILRKRLKDSSEIPGALWHIYAGKDVDKIREFLQKISKEQGLEVLPEHDPIRDQSWYVNKKLRQRLLEEYGVRTCTLIQFLGDAIVLPAGALHQVQNFHSCIQVTEDFVSPEHLVESFHLTQELRLLKEEINYDDKLQVKNILYHAVKEMVRALKIHEDEVEDMEEN

SEQ ID NO: 796 - protein, 738 aa, Homo sapiens
ELNELRKTIELLKKQNAAAQAAINGVINTPELNCKGNGTAQSADLRIRRQHSSDSVSSINSATSHSSVGSNIESDSKKKKRKNWLRSSFKQAFGKKKSPKSASSHSDIEEMTDSSLPSSPKLPHNGSTGSTPLLRNSHSNSLISECMDSEAETVMQLRNELRDKEMKLTDIRLEALSSAHQLDQLREAMNRMQSEIEKLKAENDRLKSESQGSGCSRAPSQVSISASPRQSMGLSQHSLNLTESTSLDMLLDDTGECSARKEGGRHVKIVVSFQEEMKWKEDSRPHLFLIGCIGVSGKTKWDVLDGVVRRLFKEYIIHVDPVSQLGLNSDSVLGYSIGEIKRSNTSETPELLPCGYLVGENTTISVTVKGLAENSLDSLVFESLIPKPILQRYVSLLIEHRRIILSGPSGTGKTYLANRLSEYIVLREGRELTDGVIATFNVDHKSSKELRQYLSNLADQCNSENNAVDMPLVIILDNLHHVSSLGEIFNGLLNCKYHKCPYIIGTMNQATSSTPNLQLHHNFRWVLCANHTEPVKGFLGRFLRRKLMETEISGRVRNMELVKIIDWIPKVWHHLNRFLEAHSSSDVTIGPRLFLSCPIDVDGSRVWFTDLWNYSIIPYLLEAVREGLQLYGRRAPWEDPAKWVMDTYPWAASPQQHEWPPLLQLRPEDVGFDGYSMPREGSTSKQMPPSDAEGDPLMNMLMRLQEAANYSSPQSYDSDSNSNSHHDDILDSSLESTL

SEQ ID NO: 797 - protein, 811 aa, Homo sapiens
TMIPVTELRYFADTQPAYRILKPWWDVFTDYISIVMLMIAVFGGTLQVTQDKMICLPCKWVTKDSCNDSFRGWAAPGPEPTYPNSTILPTPDTGPTGIKYDLDRHQYNYVDAVCYENRLHWFAKYFPYLVLLHTLIFLACSNFWFKFPRTSSKLEHFVSILLKCFDSPWTTRALSETVVEESDPKPAFSKMNGSMDKKSSTVSEDVEATVPMLQRTKSRIEQGIVDRSETGVLDKKEGEQAKALFEKVKKFRTHVEEGDIVYRLYMRQTIIKVIKFILIICYTVYYVHNIKFDVDCTVDIESLTGYRTYRCAHPLATLFKILASFYISLVIFYGLICMYTLWWMLRRSLKKYSFESIREESSYSDIPDVKNDFAFMLHLIDQYDPLYSKRFAVFLSEVSENKLRQLNLNNEWTLDKLRQRLTKNAQDKLELHLFMLSGIPDTVFDLVELEVLKLELIPDVTIPPSIAQLTGLKELWLYHTAAKIEAPALAFLRENLRALHIKFTDIKEIPLWIYSLKTLEELHLTGNLSAENNRYIVIDGLRELKRLKVLRLKSNLSKLPQVVTDVGVHLQKLSINNEGTKLIVLNSLKKMANLTELELIRCDLERIPHSIFSLHNLQEIDLKDNNLKTIEEIISFQHLHRLTCLKLWYNHIAYIPIQIGNLTNLERLYLNRNKIEKIPTQLFYCRKLRYLDLSHNNLTFLPADIGLLQNLQNLAITANRIETLPPELFQCRKLRALHLGNNVLQSLPSRVGELTNLTQIELRGNRLECLPVELGECPLLKRSGLVVEEDLFNTLPPEVKERLWRADKEQA

SEQ ID NO: 798 - protein, 1258 aa, Homo sapiens
ELSFPLLSLDFGAHQGLGSADMGDMKTPDFDDLLAAFDIPDIDANEAIHSGPEENEGPGGPGKPEPGVGSESEDTAAASAGDGPGVPAQASDHGLPPPDISVVSVIVKNTVCPEQSEALAGGSAGDGAQAAGVTKEGPVGPHRMQNGFGSPEPSLPGTPHSPAPPSGGTWKEKGMEGKTPLDLFAHFGPEPGDHSDPLPPSAPSPTREGALTPPPFPSSFELAQENGPGMQPPVSSPPLGALKQESCSPHHPQVLAQQGSGSSPKATDIPASASPPPVAGVPFFKQSPGHQSPLASPKVPVCQPLKEEDDDEGPVDKSSPGSPQSPSSGAEAADEDSNDSPASSSSRPLKVRIKTIKTSCGNITRTVTQVPSDPDPPAPLAEGAFLAEASLLKLSPATPTSEGPKVVSVQLGDGTRLKGTVLPVATIQNASTAMLMAASVARKAVVLPGGTATSPKMIAKNVLGLVPQALPKADGRAGLGTGGQKVNGASVVMVQPSKTATGPSTGGGTVISRTQSSLVEAFNKILNSKNLLPAYRPNLSPPAEAGLALPPTGYRCLECGDAFSLEKSLARHYDRRSMRIEVTCNHCARRLVFFNKCSLLLHAREHKDKGLVMQCSHLVMRPVALDQMVGQPDITPLLPVAVPPVSGPLALPALGKGEGAITSSAITTVAAEAPVLPLSTEPPAAPATSAYTCFRCLECKEQCRDKAGMAAHFQQLGPPAPGATSNVCPTCPMMLPNRCSFSAHQRMHKNRPPHVCPECGGNFLQANFQTHLREACLHVSRRVGYRCPSCSVVFGGVNSIKSHIQTSHCEVFHKCPICPMAFKSGPSAHAHLYSQHPSFQTQQAKLIYKCAMCDTVFTHKPLLSSHFDQHLLPQRVSVFKCPSCPLLFAQKRTMLEHLKNTHQSGRLEETAGKGAGGALLTPKTEPEELAVSQGGAAPATEESSSSSEEEEVPSSPEPPRPAKRPRRELGSKGLKGGGGGPGGWTCGLCHSWFPERDEYVAHMKKEHGKSVKKFPCRLCERSFCSAPSLRRHVRVNHEGIKRVYPCRYCTEGKRTFSSRLILEKHVQVRHGLQLGAQSPGRGTTLARGSSARAQGPGRKRRQSSDSCSEEPDSTTPPAKSPRGGPGSGGHGPLRYRSSSSTEQSLMMGLRVEDGAQQCLDCGLCFASPGSLSRHRFISHKKRRGVGKASALGLGDGEEEAPPSRSDPDGGDSPLPASGGPLTCKVCGKSCDSPLNLKTHFRTHGMAFIRARQGAVGDN

SEQ ID NO: 799 - protein, 917 aa, Homo sapiens
MIAAQLLAYYFTELKDDQVKKIDKYLYAMRLSDETLIDIMTRFRKEMKNGLSRDFNPTATVKMLPTFVRSIPDGSEKGDFIALDLGGSSFRILRVQVNHEKNQNVHMESEVYDTPENIVHGSGSQLFDHVAECLGDFMEKRKIKDKKLPVGFTFSFPCQQSKIDEAILITWTKRFKASGVEGADVVKLLNKAIKKRGDYDANIVAVVNDTVGTMMTCGYDDQHCEVGLIIGTGTNACYMEELRHIDLVEGDEGRMCINTEWGAFGDDGSLEDIRTEFDRAIDAYSLNPGKQLFEKMVSGMYLGELVRLILVKMAKEGLLFEGRITPELLTRGKFNTSDVSAIEKNKEGLHNAKEILTRLGVEPSDDDCVSVQHVCTIVSFRSANLVAATLGAILNRLRDNKGTPRLRTTVGVDGSLYKTHPQYSRRFHKTLRRLVPDSDVRFLLSESGSGKGAAMVTAVAYRLAEQHRQIEETLAHFHLTKDMLLEVKKRMRAEMELGLRKQTHNNAVVKMLPSFVRRTPDGTENGDFLALDLGGANFRVLLVKIRSGKKRTVEMHNKIYAIPIEIMQGTGEELFDHIVSCISDFLDYMGIKGPRMPLGFTFSFPCQQTSLDAGILITWTKGFKATDCVGHDVVTLLRDAIKRREEFDLDVVAVVNDTVGTMMTCAYEEPTCEVGLIVGTGSNACYMEEMKNVEMVEGDQGQMCINMEWGAFGDNGCLDDIRTHYDRLVDEYSLNAGKQRYEKMISGMYLGEIVRNILIDFTKKGFLFRGQISETLKTRGIFETKFLSQIESDRLALLQVRAILQQLGLNSTCDDSILVKTVCGVVSRRAAQLCGAGMAAVVDKIRENRGLDRLNVTVGVDGTLYKLHPHFSRIMHQTVKELSPKCNVSFLLSEDGSGKGAALITAVGVRLRTEASS

SEQ ID NO: 800 - protein, 2270 aa, Homo sapiens
MLEGLVAWVLNTYLGKYVNNLNTDQLSVALLKGAVELENLPLKKDALKELELPFEVKAGFIGKVTLQIPFYRPHVDPWVISISSLHLIGAPEKIQDFNDEKEKLLERERKKALLQALEEKWKNDRQQKGESYWYSVTASVVTRIVENIELKIQDVHLRFEDGVTNPSHPFAFGICIKNVSMQNAVNEPVQKLMRKKQLDVAEFSIYWDVDCTLLGDLPQMELQEAMARSMESRSHHYVLEPVFASALLKRNCSKKPLRSRHSPRIDCDIQLETIPLKLSQLQYRQIMEFLKELERKERQVKFRRWKPKVAISKNCREWWYFALNANLYEIREQRKRCTWDFMLHRARDAVSYTDKYFNKLKGGLLSTDDKEEMCRIEEEQSFEELKILRELVHDRFHKQEELAESLREPQFDSPGACPGAPEPGGGSGMLQYLQSWFPGWGGWYGQQTPEGNVVEGLSAEQQEQWIPEEILGTEEFFDPTADASCMNTYTKRDHVFAKLNLQLQRGTVTLLHKEQGTPQMNESAFMQLEFSDVKLLAESLPRRNSSLLSVRLGGLFLRDLATEGTMFPLLVFPNPQKEVGRVSQSFGLQTTSADRSDHYPAADPDGPVFEMLYERNPAHSHFERRLNVSTRPLNIIYNPQAIKKVADFFYKGKVHTSGFGYQSELELRVAEAARRQYNKLKMQTKAEIRQTLDRLLVGDFIEESKRWTVRLDISAPQVIFPDDFKFKNPVLVVVDLGRMLLTNTQDNSRRKSRDGSASEETQFSDDEYKTPLATPPNTPPPESSSSNGEKTPPFSGVEFSEEQLQAHLMSTKMYERYSLSFMDLQIMVGRVKDNWKHVQDIDVGPTHVVEKFNVHLQLERRLIYTSDPKYPGAVLSGNLPDLKIHINEDKISALKNCFALLTTPEMKTSDTQIKEKIFPQEEQRGSLQDSVMNLTQSIVLLEQHTREVLVESQLLLAEFKVNCMQLGVESNGRYISVLKVFGTNAHFVKRPYDAEVSLTVHGLLLVDTMQTYGADFDLLMASHKNLSFDIPTGSLRDSRAQSPVSGPNVAHLTDGATLNDRSATSVSLDKILTKEQESLIKLEYQFVSSECPSMNLDSTLQVISLQVNNLDIILNPETIVELIGFLQKSFPKEKDDLSPQPLMTDFERSFREQGTYQSTYEQNTEVAVEIHRLNLLLLRTVGMANREKYGRKIATASIGGTKVNVSMGSTFDMNGSLGCLQLMDLTQDNVKNQYVVSIGNSVGYENIISDIGYFESVFVRMEDAALTEALSFTFVERSKQECFLNLKMASLHYNHSAKFLKELTLSMDELEENFRGMLKSAATKVTTVLATKTAEYSEMVSLFETPRKTREPFILEENEIYGFDLASSHLDTVKLILNINIESPVVSIPRKPGSPELLVGHLGQIFIQNFVAGDDESRSDRLQVEIKDIKLYSLNCTQLAGREAVGSEGSRMFCPPSGSGSANSQEEAHFTRHDFFESLHRGQAFHILNNTTIQFKLEKIPIERESELTFSLSPDDLGTSSIMKIEGKFVNPVQVVLAKHVYEQVLQTLDNLVYSEDLNKYPASATSSPCPDSPLPPLSTCGESSVERKENGLFSHSSLSNTSQKSLSVKEVKSFTQIQATFCISELQVQLSGDLTLGAQGLVSLKFQDFEVEFSKDHPQTLSIQIALHSLLMEDLLEKNPDSKYKNLMVSRGAPKPSSLAQKEYLSQSCPSVSNVEYPDMPRSLPSHMEEAPNVFQLYQRPTSASRKKQKEVQDKDYPLTPPPSPTVDEPKILVGKSKFDDSLVHINIFLVDKKHPEFSSSYNRVNRSIDVDFNCLDVLITLQTWVVILDFFGIGSTADNHAMRLPPEGILHNVKLEPHASMESGLQDPVNTKLDLKVHSLSLVLNKTTSELAKANVSKLVAHLEMIEGDLALQGSIGSLSLSDLTCHGEFYRERFTTSGEEALIFQTFKYGRPDPLLRREHDIRVSLRMASVQYVHTQRFQAEVVAFIQHFTQLQDVLGRQRAAIEGQTVRDQAQRCSRVLLDIEAGAPVLLIPESSRSNNLIVANLGKLKVKNKFLFAGFPGTFSLQDKESVPSASPTGIPKHSLRKTTSTEEPRGTHSQGQFTMPLAGMSLGSLKSEFVPSTSTKQQGPQPTLSVGQESSSPEDHVCLLDCVVVDLQDMDIFAAERHPREYSKAPEDSSGDLIFPSYFVRQTGGSLLTEPCRLKLQVERNLDKEISHTVPDISIHGNLSSVHCSLDLYKYKLIRGLLENNLGEPIEEFMRPYDLQD

SEQ ID NO: 801 - protein, 382 aa, Homo sapiens
MMLKGITRLISRIHKLDPGRFLHMGTQARQSIAAHLDNQVPVESPRAISRTNENDPAKHGDQHEGQHYNISPQDLETVFPHGLPPRFVMQVKTFSEACLMVRKPALELLHYLKNTSFAYPAIRYLLYGEKGTGKTLSLCHVIHFCAKQDWLILHIPDAHLWVKNCRDLLQSSYNKQRFDQPLEASTWLKNFKTTNERFLNQIKVQEKYVWNKRESTEKGSPLGEVVEQGITRVRNATDAVGIVLKELKRQSSLGMFHLLVAVDGINALWGRTTLKREDKSPIAPEELALVHNLRKMMKNDWHGGAIVSALSQTGSLFKPRKAYLPQELLGKEGFDALDPFIPILVSNYTQRNLKVVFSIIWKTIGFNMRKLLQKKGKKSCCS

SEQ ID NO: 802 - protein, 334 aa, Homo sapiens
MSEPIRVLVTGAAGQIAYSLLYSIGNGSVFGKDQPIILVLLDITPMMGVLDGVLMELQDCALPLLKDVIATDKEDVAFKDLDVAILVGSMPRREGMERKDLLKASVKIFKSQGAALDKYAKKSVKVIVVGNPANTNCLTASKSAPSIPKENFSCLTRLDHNRAKAQIALKLGVTANDVKNVIIWGNHSTTQYPDVNHAKVKLQGEEVGVYEALEDDSWLKGEFVTTVQQRSAAVIKARKLSSAMSAAKAICDHVRDIWFGTPEGEFVSMGVISDGNSYGVPDDLLYSFPVVIKNKTRKFVEGLPINDFSREKMDLTAKELTEEKESAFEFLSSA

SEQ ID NO: 803 - protein, 1086 aa, Homo sapiens
MANLLKTVVTGCSCPLLSNLGSCKGLRVKKDFLRTFYTHQELWCKAPVKPGIPYKQLTVGVPKEIFQNEKRVALSPAGVQNLVKQGFNVVVESGAGEASKFSDDHYRVAGAQIQGAKEVLASDLVVKVRAPMVNPTLGVHEADLLKTSGTLISFIYPAQNPELLNKLSQRKTTVLAMDQVPRVTIAQGYDALSSMANIAGYKAVVLAANHFGRFFTGQITAAGKVPPAKILIVGGGVAGLASAGAEKSMGAIVRGFDTRAASLEQFKSLGAEPLEVDLKESGEGQGGYAKEMSKEFIEAEMKLFAQQCKEVDILISTALIPGKKAPVLFNKEMIESMKEGSVVVDLAAEAGGNFETTKPGELYIHKGITHIGYTDLPSRMATQASTLYSNNITKLLKAISPDKDNFYFDVKDDFDFGTMGHVIRGTVVMKDGKVIFPAPTPKNIPQGAPVKQKTVAELEAEKAATITPFRKTMSTASAYTAGLTGILGLGIAAPNLAFSQMVTTFGLAGIVGYHTVWGVTPALHSPLMSVTNAISGLTAVGGLALMGGHLYPSTTSQGLAALAAFISSVNIAGGFLVTQRMLDMFKRPTDPPEYNYLYLLPAGTFVGGYLAALYSGYNIEQIMYLGSGLCCVGALAGLSTQGTARLGNALGMIGVAGGLAATLGVLKPGPELLAQMSGAMALGGTIGLTIAKRIQISDLPQLVAASHSLVGLAAVLTCIAEYIIEYPHFAPDAAANLTKIVAYLGTYIGGVTFSGSLIAYGKLQGLLKSAPLLLPGRHLLNAGLLAASVGGIIPFMVDPSFTTGITCLGSVSALSAVMGVTLTAAIGGADMPVVITVLNSYSGWALCAEGFLLNNNLLTIVGALIGSSGAPLSYIMCVAMNRSLANVILGGYGTTSTAGGKPMEISGTHTEINLDNAIDMIREANSIIFTPGYGLCAAKAQYPIADLVKMLTEQGKKVRFGIHPVAGRMPGQLNVLLAEAGVPYDIVLEMDEINHDFPDTDLVLVIGANDTVNSAAQEDPNSIIAGMPVLEVWKSKQVIVMKRSLGVGYAAVDNPIFYKPNTAMLLGDAKKTCDALQAKVRESYQK

SEQ ID NO: 804 - protein, 178 aa, Homo sapiens
RNIIFCSVVLGTFICQIFIVEFGGKPFSCTSLSLSQWLWCLFIGIGELLWGQFISAIPTRSLKFLKEAGHGTTKEEITKDAEGLDEIDHAEMELRRGQILWFRGLNRIQTQIDVINTFQTGASFKGVLRRQNMGQHLDVKLVPSSSYVAVAPVKSSPTTSVPAVSSPPMGNQSGQSVP

SEQ ID NO: 805 - protein, 1442 aa, Homo sapiens [sequence omitted]

SEQ ID NO: 806 - protein, 445 aa, Homo sapiens
MREIVHIQAGQCGNQIGAKFWEVISDEHGIDPTGSYHGDSDLQLERINVYYNEAAGNKYVPRAILVDLEPGTMDSVRSGPFGQIFRPDNFVFGQSGAGNNWAKGHYTEGAELVDSVLDVVRKESESCDCLQGFQLTHSLGGGTGSGMGTLLISKIREEYPDRIMNTFSVMPSPKVSDTVVEPYNATLSVHQLVENTDETYCIDNEALYDICFRTLKLTTPTYGDLNHLVSATMSGVTTCLRFPGQLNADLRKLAVNMVPFPRLHFFMPGFAPLTSRGSQQYRALTVPELTQQMFDSKNMMAACDPRHGRYLTVAAIFRGRMSMKEVDEQMLNVQNKNSSYFVEWIPNNVKTAVCDIPPRGLKMSATFIGNSTAIQELFKRISEQFTTMFRRKAFLHWYTGEGMDEMEFTEAESNMNDLVSEYQQYQDATADEQGEFEEEEGEDEA

SEQ ID NO: 807 - protein, 259 aa, Homo sapiens [sequence omitted]

SEQ ID NO: 808 - protein, 530 aa, Homo sapiens
MARAGWTSPVPLCVCLLLTCGFAEAGKLLVVPMDGSHWFTMQSVVEKLILRGHEVVVVMPEVSWQLERSLNCTVKTYSTSYTLEDQNREFMVFAHAQWKAQAQSIFSLLMSSSSGFLDLFFSHCRSLFNDRKLVEYLKESSFDAVFLDPFDTCGLIVAKYFSLPSVVFTRGIFCHHLEEGAQCPAPLSYVPNDLLGFSDAMTFKERVWNHIVHLEDHLFCQYLFRNALEIASEILQTPVTAYDLYSHTSIWLLRTDFVLDYPKPVMPNMIFIGGINCHQGKPLPMEIEAYINASGEHGIVVFSLGSMVSEIPEKKAMAIADALGKIPQTVLWRYTGTRPSNLANNTILVKWLPQNDLLGHPMTRAFITHAGSHGVYESICNGVPMVMMPLFGDQMDNAKRMETKGAGVTLNVLEMTSEDLENALKAVINDKSYKENIMRLSSLHKDRPVEPLDLAVFWVEFVMRHKGAPHLRPAAHDLTWYQYHSLDVIGFLLAVVLTVAFITFKCCAYGYRKCLGKKGRVKKAHKSKTH

SEQ ID NO: 809 - protein, 3027 aa, Homo sapiens
  VARIANT 2862: Xaa = Any Amino Acid
MNLHQVLTGAVNPGDHCFSVGSIGDQRFTAYASGCDIVILGSDFERLQIIPGAKHGNIQVGCVDCSMQQGKIAASYGNVISIFEPVNLPKQKKNLELYSQWQKSGQFFLESIAHNITWDPTGSRLLTGSSYLQLWSNTNLEKPTEDENLNKTDLNFGDWKCIWHCKTASQVHLMKFSPDGEFFATAGKDDCLLKVWYNVENWRTAVTSPDGSSEKQSQGEIDFSFVYLAHPRAVNGFSWRKTSKYMPRASVCNVLLTCCKDNVCRLWVETFLPNDCLLYGGDCSHWTESINLTNNFKRNASSKERVQNALEVNLRHFRRGRRRSLALVAHTGYLPHQQDPHHVHRNTPLHANALCHFHIAASINPATDIPLLPSITSLSLNENEEKTGPFVVHWLNNKELHFTLSMEVFLQQLRKSFEQPSSEASVEDSNQADVKSDEETDDGVDDLKINPEKKELGCDKMVPNSSFTSLSSAAIDHQIEVLLSEWSKNADMLFSIHPMDGSLLVWHVDWLDEYQPGMFRQVQVSFVSRIPVAFPTGDANSLCKSIMMYACTKNVDLAIQQGKQKPSGLTRSTSMLISSGHNKSSNSLKLSIFTPNVMMISKHADGSLNQWLVSFAEESAFSTVLSISHKSRYCGHRFHLNDLACHSVLPLLLTTSHHNALRTPDVDNPEQPFDALNIEECSLTQQNKSTVDVAFQDPSAVYSELILWRVDPVGPLSFSGGVSELARINSLHVSAFSNVAWLPTLIPSYCLGAYCNSPSACFVASDGQYLRLYEAVIDAKKLLSELSNPEISKYVGEVFNIVSQQSTARPGCIIALDPITKLHGRKTQLLHVFEEDFILNNLEKKSLGKDSILSNAGSSPNGFSEKFYLIVIECTQDNRSLLHMWNLHLKSIPVSLDEKVDTKLSEAVWQPEEHYSSSPEKILSPFSQKYQACRANLQSTSRLTLFSEMVYSQELHLPEGVEIISIKPSAGHLSSSSIYPACSAPYLLATSCSDEKVRFWRCRVTDGESATSKNGKIDLAYIWEEWPLLIEDGLQSNSSITVPGRPVEVSCAHTNRLAVAYKQPASNSRSSQDFVMHVSIFECESTGGSCWVLEQTIHLDELSTVLDSGISVDSNLVAYNKQDMYLSSKENITSNTKHLVHLDWMSREDGSHILTVGIGSKLFMYGPLAGKVQDQTGKETLAFPLWESTKVVPLSKFVLLRSVDLVSSVDGSPPFPVSLSWVRDGILVVGMDCEMHVYCQWQPSSKQEPVITDSYSGSTPSITSLIKQSNSSSGLHPPKKTLTRSMTSLAQKICGKKTAFDPSVDMEDSGLFEAAHVLSPTLPQYHPLQLLELMDLGKVRRAKAILSHLVKCIAGEVVALNEAESNHERRLRSLTISASGSTTRDPQAFNKAENTDYTEIDSVPPLPLYALLAADDDSCYSSLEKSSNESTLSKSNQLSKESYDELFQTQLLMTDTHMLETDEENTKPRVIDLSQYSPTYFGPEHAQVLSGHLLHSSLPGLSRMEQMSLMALADTIATTSTDIGESRDRSQGGETLDECGLKFLLAVRLHTFLTTSLPAYRAQLLHQGLSTSHFAWAFHSVAEEELLNMLPAMQKDDPTWSELRAMGVGWWVRNTRILRKCIEKVAKAAFYRKNDPLDAAIFYLAMKKKAVIWGLYRAEKNTRMTQFFGHNFEDERWRKAALKNAFSLLGKQRFEHSAAFFLLAGCLRDAIEVCLEKLNDIQLALVIARLYESEFDTSAAYKSILRKKVLGIDSPVSELCSLNINMHHDPFLRSMAYWILEDYSGALETLIKQPIRENDDQVLSASNPTVFNFYNYLRTHPLLLRRHFGSSDTFSTHMSLTGKSGLAGTINLSERRLFFTTASAHLKAGCPMLALEVLSKMPKVIKKTRPFYRASSFLDTSKDCSPSSPLKLDAREDKSSAVDWSQSLINGFGSSSEGSSEKQSNSTLSFDWSQPSVVFQDDSLELKWDSDNDEENEDVPISMKELKPLQRKTDKKLDDISSNYTESFSTLDENDLLNPSEDIIAVQLKFRACLKILTVELRTLSTGYEIDGGKLRYQLYHWLEKEVIALQRTCDFCSDAEELQSAFGRNEDEFGLNEDAEDLPHQTKVKQLRENFQEKRQWLLKYQSLLRMFLSYCILHGSHGGGLASVRMELILLLQESQQETSEPLFSSLLSEQTSVPLLFACTANAKTVVANPLLHLSNLTHDILHAIINFDSPPHPDIQSNKVYVMHTLAASLSACIYQCLCGSHNYSSFQTNQFTGMVYQTVLLPHRPSLKTGSLDEALTPNTSPAQWPGITCLIRLLNSSGEEAQSGLTVLLCEILTAVYLSLFIHGLATHSSNELFRIVAHPLNEKMWSAVFGGGAHVPSKEQTHSKTLPVSSLVEEGEKQNKRFRPSKMSCRESAPLTPSSAPVSQESLAVKEKFIPPELSIWDYFIAKPFLPSSQSRAEYDSZESLGSDDDDNDDDDDVLASDFHLQEHSNSNSYSWSLMRLAMVQLVLNNLKTFYPFAGHDLAELPVSSPLCHAVLKTLQCWEQVLLRRLEIHGGPPQNYIASHTAEESLSAGPAILRHKALLEPTNTPFKSKHHLALSVKRLWQYLVKQEEIQETFIKNIFTKKRCLNEIEADLGYPGGKARIIHKESDIITAFAVNKANRNCIAIASSHDVQELDVSGILATQVYTWVDDDIEVETKGSEDFLVIHARDDLTAVQGTTPYTHSNPGTPINMPWLGSTQTGRGASVMIKKAINNVRRMTSHPTLPYYLTGAQDGSVRMFEWGHSQQITCFRSGGNSRVTRMRFNYQGNKFGIVDADGYLSLYQTNWKCCPVTGSMPKPYLTWQCHNKTANDFVFVSSSSLIATAGLSTDXRNVCLWDTLVAPADSLVHAFTCHDSGATVLAYAPKHQLLISGGRKGFTYVFDLCQRQQRQLFQSHDSPVKAVAVDPTEEYFVTGSAEGNIKIWSLSTFGLLHTFVSEHARQSIFRNIGTGVMQIETGPANHIFSCGADGTMKMRILPDQFSPLNEVLKNDVKFML

SEQ ID NO: 810 - protein, 186 aa, Homo sapiens
MAVARAGVLGVQWLQRASRNVMPLGARTASHMTKDMFPGPYPRIPEERAAAAKKYNMRVEDYEPYPDDGMGYGDYPKLPDRSQHERDPWYSWDQPGLRLNWGEPMHWHLDMYNRNRVDTSPTPVSWHVMCMQLFGFLAFMIFMCWVGDVYPVYQPVGPKQYPYNNLYLERGGDPSKEPERVVHNEI

SEQ ID NO: 811 - protein, 1684 aa, Homo sapiens
MARNAISDDEGTLIASSQTLIFFCVKRRNNTRDHELEDDDGEPVHGDPAEHDENDDEEDDDDGISFFLDFDFSQLFNLDSGYFCSMMWDPYICFVVGNEYENDGFIVNDEDEEEEEEEDEERKDSDEERQKKKKKRKKKDEGLDEDDYLLLQDNNVKFKKRQYKRLKKAQREQGNGQGESSDDEFDSRGGTRRSAEDKIKDRLFDDVDVDDPPDDVGDEEDLVVEEDVVGSEDEMADFIVDEDDEHGPPKRGNSKKKKYRQGSDITAMRDANEIFGDVDELLTIRKKGLASNQRMERRLEDEFEPTVLSEKYMTGNDDEIRQLDIPERMQISEESTGSPPVDEISIEEESNWIYAQLASQLRESDGTFDGRGFSVNKDDIAKFLELHHVQKLEVLDSFSPMYRKEQCRSLLDTGDFDGANQGKKPETKWHKVFWMIHDLDKKWLLLRKRKMALHGYYTKRYEEESRRVYDETRLNLNQYLFESVIKSLKVAETEREVDDVDSKFNLHFPPGEIGVDEGQYKRPKRKSQYSICSKAGLWEVANKFGYSAEQLGLALSLEKLVDELEDAKETPEEMAKNFVCAMFENSLAVLKGARHMAAVEISCEPSVKKYVRGIYMENAVVSTSPTADGNTVIDSFHQFSGIKWLREKPLSKFEGAQWLLIQKGEEEKLLQVTFKLPENYMNRLISDCNEHYLSVGVSKYAQLWNEQRKLILEDALHAFLLPSMEKEARSLLTSRAKSRLLSEYGQALWNKVSAGPYQKKEMDINLDEEAAPRVMACCWGPGKPPNTFVMLDSSGEVLDVLYAGSLTSRSQNVNDQQRKKSDQDRVLKFMMDHQPHVVALGAVNLSCTRLKDDIYEVIFQMVEEKPRDVGHGMDDLSIVYVDESLPRLYENSRISGEQLPQQSGNVRRAVALGRYLQNPLAMVATLCGPGREILSWKLHPLENFLQLDEKYGMVEQVMVDITNQFISGLGPRKAASLQRSLVRAGSIFVRKDLIMHGLGKKVFVNAAGFLRIRRSGLAASSSQFIDLLDDTRIHPESYSLAQELAKDIYDEDVRGDSNDDEDAIEMAIEHVRDRPASLRKVVLDEYLASKKRENKKETYSNIIRELSCGFQDWRIPFKEPSPDEEFYMISGETEDTIAEGRIVQASVRRLQNGRAICVLDSGLTGMLMKEDFSDDGRDIVDLADQLKEGDILTCKIKSIQKQRYQVFLICKESEMRNNRHQHNQNVDAYYHEDRNSLQLVKEKARKEKELVRKHFKSRMIVHPRFQNITADQATEYLSDKDFGESIVRPSSRGLNFLTLTLKIYDGVYAHKEIAEGGKENKDITSLQCIGKTLTIGEDTFEDLDEVMDRYVDPLVSHLKTMLNYRKFRKGTKSEVDDLLRIEKGENPSRIVYCFGISHEHPGTFILSYIRSTNPHHEYIGLYPKGFKFRKRMFEDIDRLVAYFQRHIDDPLQESAPSIRSIAAKVPMRSPADHGSSGGSGWGSSQSEGGWKGNSDRSGSGRGGEYRNGGGRDGHPSGAPRPYGGRGRGRGRGRRDDMNSDRQDGNGDWGNNDTGTADGGWGNSGGGGWGSESAGKKTGGGSTGGWGSESGGNKSDGAGSWGSGSGGGGSGGWGNDSGGKKSSEDGGFGSGSGGGGSDWGNESGGKKSSADGGWGSESGGKKSDGEGGWGNEPSSRKSDGGGGGW

SEQ ID NO: 812 - protein, 1082 aa, Homo sapiens
MIKLKSLFRRGQGNSSSHSSNSSHKQQQNSSNNNRQKSQSSTSLNTAHEQQQQHSITAATTKFYAHQETASYERGVDVGDEGALLLTNQQQEQRRQQQQLLQQPQSNTLPQKKSKLKGQKQPKLLPVQQPHSNAPEPHDPQQPLMTSLAAVPQASATGSSSNSNINNNNALAALQDGGAAAAAAADFYQQLAAAATATATATSANGSNTSADSPVSSFPAAAAAVAVAAVAASSYQQQQQQQQLLNNEQQQQQLLEANNKMQELHKQMERFRSEQMQLETRITELLPYQSEVAKLKGDLVKMQSLQEKSQMEIGNLKYENESLRNRLRDVVNSPLSDAEKHQIIQDSQRLHSSAPASIALPSTHDAHDGTPCLTPDWDKQSSSSEISVACLQDKIIQMEETHYSTNEELQATLQELADLQTQLTDTQTENERLAEEKDVLFQSLCRQTEKLNESRTQISTLQELLLRDTKQPAPEVSASEREQKLLDLIKTSQEEREAVLLKQEELGAELAEMKQAREAGQLELQRQRERIALLDSQLDAANAERRQGEAQFSQAMEEISQRAIEISRLSTLLENARSKIEELEADLSRGDKTDLSEVLDVARKEKDALEERVAELQDQCSRSQAELRRLRDQLSGLTEECKVVKNNAKCAVSHLEYRLEQLQRDKDKIAGEWQALEERVAELQVQCKCHQEDKAQLQSLLAETQRHLGDVQLKLGEAECRLDQETQLRRKEAEEWQQFQADLLMTVRVANDFKTEALSAREQLVLDNKTQKEKIRLLEQQLEKLTKQQMQQSETPQSVLSTVQREMEMATRRSKLSFSRQDSRLSVKTLIESIENNKAQGKADESESHYSSTSSLNSGTPDLGTTPIIFPPSSDWHESIRLPVLQSTNLHVNVGNEAGAGQGTNTSSGSGGDLASTTKATLPLRDQQQLAITSTQSQVQNVSQPSTPATPSSAGSSSSGGLPFGNVSKSFISGERKDPLNMLAKNGGSKRNALLKWCQNKTVGYRNIDITNFSSSWNDGLAFCAILHSYLPDRIPYDQLTPANKRRNFSLAFAAAESVGIGTTLVSFHGQQKLNLFILILI

SEQ ID NO: 813 - protein, 231 aa, Homo sapiens
VVGKSADFVVEAIGTEVGTLGFSIEGPSQAKIECDDKGDGSCDVRYWPTEPGEYAVHVICDDEDIRDSPFIAHILPAPPDCFPDKVKAFGPGLEPTGCIVDKPAEFTIDARAAGKGDLKLYAQDADGCPIDIKVIPNGNGTFRCSYVPTKPIKHTIIISWGGVNVPKSPFRVNVGEGSHPERVKVYGPGVEKTASRPMSPPTFTVDCSEAGQGDVSIGIKCAPGVVGPAEA

SEQ ID NO: 814 - protein, 1641 aa, Homo sapiens
MDNQGHKNLKTSQEGSSDDRERKQERETFSSAEGTVDKDTTIMELRDRLPKKQQASASTDGVDKLSGKEQSFTSLEVRKVAETKEKSKHLKTKTCKKVQDGLSDIAEKFLKKDQSDETSEDDKKQSKKGTEEKKKPSDFKKKVIKMEQQYESSSDGTEKLPEREEICHFPKGIKQIKNGTTDGEKKSKKIRDKTSKKKDELSDYAEKSTGKGDSCDSSEDKKSKNGAYGREKKRCKLLGKSSRKRQDCSSSDTEKYSMKEDGCNSSDKRLKRIELRERRNLSSKRNTKEIQSGSSSSDAEESSEDNKKKKQRTSSKKKAVIVKEKKRNSLRTSTKRKQADITSSSSSDIEDDDQNSIGEGSSDEQKIKPVTENLVLSSHTGFCQSSGDEALSKSVPVTVDDDDDDNDPENRIAKKMLLEEIKANLSSDEDGSSDDEPEEGKKRTGKQNEENPGDEEAKNQVNSESDSDSEESKKPRYRHRLLRHKLTVSDGESGEEKKTKPKEHKEVKGRNRRKVSSEDSEDSDFQESGVSEEVSESEDEQRPRTRSAKKAELEENQRSYKQKKKRRRIKVQEDSSSENKSNSEEEEEEKEEEEEEEEEEEEEEEDENDDSKSPGKGRKKIRKILKDDKLRTETQNALKEEEERRKRIAEREREREKLREVIEIEDASPTKCPITTKLVLDEDEETKEPLVQVHRNMVIKLKPHQVDGVQFMWDCCCESVKKTKKSPGSGCILAHCMGLGKTLQVVSFLHTVLLCDKLDFSTALVGLSSSILAFNWMNEFEKWQEGLKDDEKLEVSELATVKRPQERSYMLQRWQEDGGVMIIGYEMYRNLAQGRNVKSRKLKEIFNKALVDPGPDFVVCDEGHILKNEASAVSKAMNSIRSRRRIILTGTPLQNNLIEYHCMVNFIKENLLGSIKEFRNRFINPIQNGQCADSTMVDVRVMKKRAHILYEMLAGCVQRKDYTALTKFLPPKHEYVLAVRMTSIQCKLYQYYLDHLTGVGNNSEGGRGKAGAKLFQDFQMLSRIWTHPWCLQLDYISKENKGYFDEDSMDEFIASDSDETSMSLSSDDYTKKKKKGKKGKKDSSSSGSGSDNDVEVIKVWNSRSRGGGEGNVDETGNNPSVSLKLEESKATSSSNPSSPAPDWYKDFVTDADAEVLEHSGKMVLLFEILRMAEEIGDKVLVFSQSLISLDLIEDFLELASREKTEDKDKPLIYKGEGKWLRNIDYYRLDGSTTAQSRKKWAEEFNDETNVRGRLFIISTKAGSLGINLVAANRVIIFDASWNPSYDIQSIFRVYRFGQTKPVYVYRFLAQGTMEDKIYDRQVTKQSLSFRVVDQQQVERHFTMNELTELYTFEPDLLDDPNSEKKKKRDTPMLPKDTILAELLQIHKEHIVGYHEHDSLLTTKKKKRLTEEERKAAWAEYEGEKRVLTMRFNIPTGTNLPPVSFNSQTPYIPFNLGALSAMSNQQLEDLINQGREKVVEATNSVTAVRIQPLEDIISAVWKENMNLSEAQVQALALSRQASQELDVKRREAIYNDVLTKQQMLIQLCSANTYEQKAPAAVQSAATATNDLSTTTLGHHMMPKPRNLIMNPSNYQQIDMRGMYQPVAGGMQPPPLQRCTTPNEKQKIQDLPKGNQCDFALKA

SEQ ID NO: 815 - protein, 1641 aa, Homo sapiens; identical to SEQ ID NO: 814

SEQ ID NO: 816 - protein, 194 aa, Homo sapiens
WSVTRPGDRPDMWCPHPEGRPWRDDPPLPPPPIRLWTPSSLPPSTLPDPPKSPGSSLPQGTRSTAPSIPNGPDSQRGVRKEKAISHRLILLAPGSSTGRRVGLCRHDGSVVREGPPPMCLGRGPPKPLRGSAKGLESAPAHTGPCSLVAIVSATSTFRSLPRACPRSLSPPWHAPLCPHTLCVSGDSGDSSGVT

SEQ ID NO: 817 - protein, 407 aa, Homo sapiens
SSDAQAPLAQPESPTASAGDEPRSTPESGDSDKESVGSSSTSNEGGRRKEKSKRDREKDKKRADSVANKLGSFGKTLGSKLKKNMGGLMHSKGSKPGGVGTGLGGSSGTETLEKKKKNSLKSWKGGKEEAAGDGPVSEKPPAESVGNGGSKYSQEVMQSLSILRTAMQGEGKFIFVGTLKMGHRHQYQEEMIQRYLSDAEERFLAEQKQKEAERKIMNGGIGGGPPPAKKPEPDAREEQPTGPPAESRAMAFSTGYPGDFTIPRPSGGGVHCQEPRRQLAGGPCVGGLPPYATFPRQCPPGRPYPHQDSIPSLEPGSHSKDGLHRGALLPPPYRVADSYSNGYREPPEPDGWAGGLRGLPPTQTKCKQPNCSFYGHPETNNFCSCCYREELRRREREPDGELLVHRF

SEQ ID NO: 818 - protein, 321 aa, Homo sapiens
VSSDGTSWTLLGLPAVSHLDSGDYICQAKNFLGASETVISLIVTEPPTSTEHSGSPGALWARTGGGGEAAAYNNKLVARHVPQIPKPAVLATGPSVPSTKEELTLEHFQMDALGELSDGRAGPSEARMVRSVKVVGDTYHSVSLVWKAPQAKNTTAFSVLYAVFGQHSMRRVIVQPGKTRVTITGLLPKTKYVACVCVQGLVPRKEQCVIFSTNEVVDAENTQQLINVVVISVAIVIALPLTLLVCCSALQKRCRKCFNKDSTEATVTYVNLERLGYSEDGLEELSRHSVSEADRLLSARSSVDFQAFGVKGGRRINEYFC

SEQ ID NO: 819 - protein, 207 aa, Homo sapiens
GVRAGRASASSRRNLSRLPRPRCPKPQRLELGARSLAPTAWPGVRDATRAPRRGHRLSPADDELYQRTRISLLQREAAQAMYIDSYNSRGFMINGNRVLGPCALLPHSVVQWNVGSHQDITEDSFSLFWLLEPRIEIVVVGTGDRTERLQSQVLQAMRQRGIAVEVQDTPNACATFNFLCHEGRVTGAALIPPPGGTSHTSLGQAAQ

SEQ ID NO: 820 - protein, 207 aa, Homo sapiens; identical to SEQ ID NO: 819

SEQ ID NO: 821 - protein, 450 aa, Homo sapiens
GGTPRAAATRREAAALPPVTLALLCLDGVFLSSAENDFVHRIQEELDRFLLQKQLSKVLLFPPLSSRLRYLIHRTAENFDLLSSFSVGEGWKRRTVICHQDIRVPSSDGLSGPCRAPASCPRRYHGPRPISNQGAAAVPRGARAGRWYRGRKPDQPLYVPRVLRRQEEWGLTSTSVLKREAPAGRDPEEPGDVGAGDPNSDQGLPVLMTQGTEDLKGPGQRCENEPLLDPVGPEPLGPESQSGKGDMVEMATRFGSTLQLDLEKGKESLLEKRLVAEEEEDEEEVEEDGPSSCSEDDYSELLQEITDNLTKKEIQIEKIHLDTSSFVEELPGEKDLAHVVEIYDFEPALKTEDLLATFSEFQEKGFRIQWVDDTHALGIFPCLASAAEALTREFSALKIRPLTQGTKQSKLKALQRPKLLRLVKERPQTNATVARRLVARALGLQHKKKK

SEQ ID NO: 822 - protein, 1696 aa, Homo sapiens
RSRPSAPETDDSRVGGIMRGEKNYYFRGAAGDHGSCPTTTSPLASALLMPSEAVSSSWSESGGGLSGGDEEDTRLLQLLRTARDPSEAFQALQAALPRRGGRLGFPRRKEALYRALGRVLVEGGSDEKRLCLQLLSDVLRGQGEAGQLEEAFSLALLPQLVVSLREENPALRKDALQILHICLKRSPGEVLRTLIQQGLESTDARLRASTALLLPILLTTEDLLLGLDLTEVIISLARKLGDQETEEESETAFSALQQIGERLGQDRFQSYISRLPSALRRHYNRRLESQFGSQVPYYLELEASGFPEDPLPCAVTLSNSNLKFGIIPQELHSRLLDQEDYKNRTQAVEELKQVLGKFNPSSTPHSSLVGFISLLYNLLDDSNFKVVHGTLEVLHLLVIRLGEQVQQFLGPVIAASVKVLADNKLVIKQEYMKIFLKLMKEVGPQQVLCLLLKHLKHKHSRVREEVVNICICSLLTYPSEDFDLPKLSFDLAPALVDSKRRVRQAALEAFAVLASSMGSGKTSILFKAVDTVELQDNGDGVMNAVQARLARKTLPRLTEQGFVEYAVLMPSSAGGRSNHLAHGADTDWLLAGNRTQSAHCHCGDHVRDSMHIYGSYSPTICTRRVLSAGKGKNKLPWENEQPGIMGENQTSTSKDIEQFSTYDFIPSAKLKLSQGMPVNDDLCFSRKRVSRNLFQNSRDFNPDCLPLCAAGTTGTHQTNLSGKCAQLGFSQICGKTGSVGSDLQFLGTTSSHQEKVYASLNFGSKTQQTFGSQTECTSSNGQNPSPGAYILPSYPVSSPRTSPKHTSPLIISPKKSQDNSVNFSNSWPLKSFEGLSKPSPQKKLVSQKSSDPTGRNHGENSQEKPPVQLTPALVRSPSSRRGLNGTKPVPPIPRGISLLPDKADLSTVGHKKKEPDDIWKCEKDSLPIDLSELNFKDKDLDQEEMHSSLRSLRNSAAKKRAKLSGSTLDLESPDSAMKLDLTMDSPSLSSSPNINSYSESGVYSQESLTSSLSTTPQGKRIMSDIFPTFGSKPCPTRLSSAKKKISHIAEQSPSAGSSSNPQQISSFDFTTTKALSEDSVVVVGKGVFGSLSSAPATCSQSVISSVENGDTFSIKQSIEPPSGIYGRSVQQNISSYLDVENEKDAKVSISKSTYNKMRQKRKEEKELFHNKDCEKKEKNSWERMRHTGTEKMASESETPTGAISQYKERMPSVTHSPEIMDLSELRPFSKPEIALTEALRLLADEDWEKKIEGLNFIRCLAAFHSEILNTKLHETNFAVVQEVKNLRSGVSRAAVVCLSDLFTYLKKSMDQELDTTVKVLLHKAGESNTFIREDVDKALRAMVNNVTPARAVVSLINGGQRYYGRKMLFFMMCHPNFEKMLEKYVPSKDLPYIKDSVRNLQQKGLGEIPLDTPSAKGRRSHTGSVGNTRSSSVSRDAFNSAERAVTEVREVTRKSVPRNSLESAEYLKLITGLLNAKDFRDRINGIKQLLSDTENNQDLVVGNIVKIFDAFKSRLHDSNSKVNLVALETMHKMIPLLRDHLSPIINMLIPAIVDNNLNSKNPGIYAAATNVVQALSQHVDNYLLLQPFCTKAQFLNGKAKQDMTEKLADIVTELYQRKPHATEQKVLVVLWHLLGNMTNSGSLPGAGGNIRTATAKLSKALFAQMGQNLLNQAASQPPHIKKSLEELLDMTILNEL

SEQ ID NO: 823 - protein, 1637 aa, Homo sapiens
LQKVFVAFREFNLSESKVCELQLPDINLVNDQKKLVSSDLWRIVLNSSQNGADDQSSASESGSQSTCDPLVTPTALAACTRVDSCFTPWFVPSLCVSFQFAHLEFHLCHHLDQLGTAAPQYLQPFVSDRNMPSELEYMIVSFREPHMYLRQWNNGSVCQEIQFLAQADCKLLECRNVTMQSVVKPFSIFGQMAVSSDVVEKLLDCTVIVDSVFVNLGQHVVHSLNTAIQAWQQNKCPEVEELVFSHFVICNDTQETLRFGQVDTDENILLASLHSHQYSWRSHKSPQLLHICIEGWGNWRWSEPFSVDHAGTFIRTIQYRGRTASLIIKVQQLNGVQKQIIICGRQIICSYLSQSIELKVVQHYIGQDGQAVVREHFDCLTAKQKLPSYILENNELTELCVKAKGDEDWSRDVCLESKAPEYSIVIQVPSSNSSIIYVWCTVLTLEPNSQVQQRMIVFSPLFIMRSHLPDPIIIHLEKRSLGLSETQIIPGKGQEKPLQNIEPDLVHHLTFQAREEYDPSDCAVPISTSLIKQIATKVHPGGTVNQILDEFYGPEKSLQPIWPYNKKDSDRNEQLSQWDSPMRVKLSIWKPYVRTLLIELLPWALLINESKWDLWLFEGEKIVLQVPAGKIIIPPNFQEAFQIGIYWANTNTVHKSVAIKLVHNLTSPKWKDGGNGEVVTLDEEAFVDTEIRLGAFPGHQKLCQFCISSMVQQGIQIIQIEDKTTIINNTPYQIFYKPQLSVCNPHSGKEYFRVPDSATFSICPGGEQPAMKSSSLPCWDLMPDISQSVLDASLLQKQIMLGFSPAPGADSSQCWSLPAIVRPEFPRQSVAVPLGNFRENGFCTRAIVLTYQEHLGVTYLTLSEDPSPRVIIHNRCPVKMLIKENIKDIPKFEVYCKKIPSECSIHHELYHQISSYPDCKTKDLLPSLLLRVEPLDEVTTEWSDAIDINSQGTQVVFLTGFGYVYVDVVHQCGTVFITVAPEGKAGPILTNTNRAPEKIVTFKMFITQLSLAVFDDLTHHKASAELLRLTLDNIFLCVAPGAGPLPGEEPVAALFELYCVEICCGDLQLDNQLYNKSNFHFAVLVCQGEKAEPIQCSKMQSLLISNKELEEYKEKCFIKLCITLNEGKSILCDINEFSFELKPARLYVEDTFVYYIKTLFDTYLPNSRLAGHSTHLSGGKQVLPMQVTQHARALVNPVKLRKLVIQPVNLLVSIHASLKLYIASDHTPLSFSVFERGPIFTTARQLVHALAMHYAAGALFRAGWVVGSLDILGSPASLVRSIGNGVADFFRLPYEGLTRGPGAFVSGVSRGTTSFVKHISKGTLTSITNLATSLARNMDRLSLDEEHYNRQEEWRRQLPESLGEGLRQGLSRLGISLLGAIAGIVDQPMQNFQKTSEAQASAGHKAKGVISGVGKGIMGVFTKPIGGAAELVSQTGYGILHGAGLSQLPKQRHQPSDLHADQAPNSHVKYVWKMLQSLGRPEVHMALDVVLVRGSGQEHEGCLLLTSEVLFVVSVSEDTQQQAFPVTEIDCAQDSKQNNLLTVQLKQPRVACDVEVDGVRERLSEQQYNRLVDYITKTSCHLAPSCSSMQIPCPVVAAEPPPSTVKTYHYLVDPHFAQVFLSKFTMVKNKALRKGFP

SEQ ID NO: 824 - protein, 1441 aa, Homo sapiens
GYNIEPIMLYQDMTARDLLQQRYTLPNGDTAWRSSPLVNAALEGKLVLLDGIHRVNAGTLAVLQRLIHDRELSLYDGSRLLREDRYMRLKEELQLSDEQLQKRSIFPIHPSFRIIALAEPPVIGSTAHQWLGPEFLTMFFFHYMKPLVKSEEIQVIKEKVPNVPQEALDKLLSFTHKLRETQDPTAQSLAASLSTRQLLRISRRLSQYPNENLHSAVTKACLSRFLPSLARSALEKNLADATIEINTDDNLEPELKDYKCEVTSGTLRIGAVSAPIYNAHEKMKVPDVLFYDNIQHVIVMEDMLKDFLLGEHLLLVGNQGVGKNKIVDRFLHLLNRPREYIQLHRDTTVQTLTLQPSVKDGLIVYEDSPLVKAVKLGHILVVDEADKAPTNVTCILKTLVENGEMILADGRRIVANSANVNGRENVVVIHPDFRMIVLANRPGFPFLGNDFFGTLGDIFSCHAVDNPKPHSELEMLRQYGPNVPEPILQKLVAAFGELRSLADQGIINYPYSTREVVNIVKHLQKFPTEGLSSVVRNVFDFDSYNNDMREILINTLHKYGIPIGAKPTSVQLAKELTLPEQTFMGYWTIGQARSGMQKLLCPVETHHIDIKGPALINIQEYPIERHEERSLNFTEECASWRIPLDEINIICDIATSHENEQNTLYVVTCNPASLYFMNMTGKSGFFVDFFDIFPRTANGVWHPFVTVAPLGSPLKGQVVLHEQQSNVILLLDTTGRALHRLILPSEKFTSKKPFWWNKEEAETYKMCKEFSHKNWLVFYKEKGNSLTVLDVLEGRTHTISLPINLKTVFLVAEDKWLLVESKTNQKYLLTKPAHIESEGSGVCQLYVLKEEPPSTGFGVTQETEFSIPHKISSDQLSSEHLSSAVEQKIASPNRILSDEKNYATIVVGFPDLMSPSEVYSWKRPSSLHKRSGTDTSFYRGKKKRGTPKQSNCVTLLDTNQVVRILPPGEVPLKDIYPKDVTPPQTSGYIEVTDLQSKKLRYIPIPRSESLSPYTTWLSTISDTDALLAEWDKSGVVTVDMGGHIRLWETGLERLQRSLMEWRNMIGQDDRNMQITINRDSGEDVSSPKHGKEDPDNMPHVGGNTWAGGTGGRDTAGLGGKGGPYRLDAGHTVYQVSQAEKDAVPEEVKRAAREMGQRAFQQRLKEIQMSEYDAATYERFSGAVRRQVHSLRIILDNLQAKGKERQWLRHQATGELDDAKIIDGLTGEKAIYKRRGELEPQLGSPQQKPKRLRLVVDVSGSMYRFNRMDGRLERTMEAVCMVMEAFENYEEKFQYDIVGHSGDGYNIGLVPMNKIPKDNKQRLEILKTMHAHSQFCMSGDHTLEGTEHAIKEIVKEEADEYFVIVLSDANLSRYGIHPAKFAQILTRDPQVNAFAIFIGSLGDQATRLQRTLPAGRSFVAMDTKDIPQILQQIFTSTMLSSV

SEQ ID NO: 825 - protein, 978 aa, Homo sapiens
TGAPAWPSRRLRDLPAGGMWRLRRAAVACEVCQSLVKHSSGIKGSLPLQKLHLVSRSIYHSHHPTLKLQRPQLRTSFQQFSSLTNLPLRKLKFSPIKYGYQPRRNFWPARLATRLLKLRYLILGSAVGGGYTAKKTFDQWKDMIPDLSEYKWIVPDIVWEIDEYIDFEKIRKALPNSEDLVKLAPDFDKIVESLSLLKDFFTSGSPEETAFRATDRGSESDKHFRKVSDKEKIDQLQEELLHTQLKYQRILERLEKENKELRKLVLQKDDKGIHHRKLKKSLIDMYSEVLDVLSDYDASYNTQDHLPRVVVVGDQSAGKTSVLEMIAQARIFPRGSGEMMTRSPVKVTLSEGPHHVALFKDSSREFDLTKEEDLAALRHEIELRMRKNVKEGCTVSPETISLNVKGPGLQRMVLVDLPGVINTVTSGMAPDTKETIFSISKAYMQNPNAIILCIQDGSVDAERSIVTDLVSQMDPHGRRTIFVLTKVDLAEKNVASPSRIQQIIEGKLFPMKALGYFAVVTGKGNSSESIEAIREYEEEFFQNSKLLKTSMLKAHQVTTRNLSLAVSDCFWKMVRESVEQQADSFKATRFNLETEWKNNYPRLRELDRNELFEKAKNEILDEVISLSQVTPKHWEEILQQSLWERVSTHVIENIYLPAAQTMNSGTFNTTVDIKLKQWTDKQLPNKAVEVAWETLQEEFSRFMTEPKGKEHDDIFDKLKEAVKEESIKRHKWNDFAEDSLRVIQHNALEDRSISDKQQWDAAIYFMEEALQARLKDTENAIENMVGPDWKKRWLYWKNRTQEQCVHNETKNELEKMLKCNEEHPAYLASDEITTVRKNLESRGVEVDPSLIKDTWHQVYRRHFLKTALNHCNLCRRGFYYYQRHFVDSELECNDVVLFWRIQRMLAITANTLRQQLTNTEVRRLEKNVKEVLEDFAEDGEKKIKLLTGKRVQLAEDLKKVREIQEKLDAFIEALHQEK

SEQ ID NO: 826 - protein, 357 aa, Homo sapiens [sequence omitted]

SEQ ID NO: 827 - protein, 903 aa, Homo sapiens
MPPTEDRSWWRGKRGFQLCHGLVGSWPACSAPSCAPALLGSGCGSGESCDRGCLAAILASTSATQARMVLRCCSEFIEAHGVVDGIYRLSGVSSNIQRLRHEFDSERIPELSGPAFLQDIHSVSSLCKLYFRELPNPLLTYQLYGKFSEAMSVPGEEERLVRVHDVIQQLPPPHYRTLEYLLRHLARMARHSANTSMHARNLAIVWAPNLLRSMELESVGMGGAAAFREVRVQSVVVEFLLTHVDVLFSDTFTSAGLDPAGRCLLPRPKSLAGSCPSTRLLTLEEAQARTQGRLGTPTEPTTPKAPASPAERRKGERGEKQRKPGGSSWKTFFALGRGPSVPRKKPLPWLGGTRAPPQPSAWLDDGDELDFSPPRCLEGLRGLDFDPLTFRCSSPTPGDPAPPASPAPPAPASAFPPRVTPQAISPRGPTSPASPAALDISEPLAVSVPPAVLELLGAGGAPASATPTPALSPGRSLRPHLIPLLLRGAEAPLTDACQQEMCSKLRGAQGPLARLMALALAERAQQVAEQQSQQECGGTPPASQSPFHRSLSLEVGGEPLGTSGSGPPPNSLAHPGAWVPGPPPYLPRQQSDGSLLRSQRPMGTSRRGLRGPAQVSAQLRAGGGGRDAPEAAAQSPCSVPSQVPTPGFFSPAPRECLPPFLGVPKPGLYPLGPPSFQPSSPAPVWRSSLGPPAPLDRGENLYYEIGASEGSPYSGPTRSWSPFRSMPPDRLNASYGMLGQSPPLHRSPDFLLSYPPAPSCFPPDHLGYSAPQHPARRPTPPEPLYVNLALGPRGPSPASSSSSSPPAHPRSRSDPGPPVPRLPQKQRAPWGPRTPHRVPGPWGPPEPLLLYRAAPPAYGRGGELHRGSLYRNGGQRGEGAGPPPPYPTPSWSLHSEGQTRSYC

SEQ ID NO: 828 - protein, 119 aa, Homo sapiens [sequence omitted]

SEQ ID NO: 829 - protein, 161 aa, Homo sapiens
WVGVAMASRVLSAYVSRLPAAFAPLPRVRMLAVARPLSTALCSAGTQTRLGTLQPALVLAQVPGRVTQLCRQYSDMPPLTLEGIQDRVLYVLKLYDKIDPEKLSVNSHFMKDLGLDSLDQVEIIMAMEDEFGFEIPDIDAEKLMCPQEIVDYIADKKDVYE

SEQ ID NO: 830 - protein, 761 aa, Homo sapiens
QTSSTGNEAGGVNSNQFEELLQERDKLKQQVKKMEEWKQQVMTTVQNMQRESAQLQEELHQLQAQVLVDSDNNSKLQVDYTGLIQSYEQNETKLKNFGQELAQVQHSIGQLCNTKDLLLGKLDIISPQLSSASLLTPQSAECLRASKSEVLSESSELLHEELEELRKSLQEKDATIRTLQENNHRLSDSIAATSELERKEHEQTDSEIKQLKEKQDVLQKLLKEKDLLIKAKSDQLLSSNENFTNKVNENELLRQAVTNLKERILILEMDIGKLKGENEKIVETYRGKETEYQALQETNMKFSMMLREKEFECHSMKEKALAFEQLLKEKEQGKTGELNQLLNAVKSMQEKTVVFQQERDQVMLALKQKQMENTALQNEVQRLRDKEFRSNQELERLRNHLLESEDSYTREALAAEDREAKLRKKVTVLEEKLVSSSNAMENASHQASVQVESLQEQLNVVSKQRDETALQLSVSQEQVKQYALSLANLQMVLEHFQQEEKAMYSAELEKQKQLIAEWKKNAENLEGKVISLQECLDEANAALDSASRLTEQLDVKEEQIEELKRQNELRQEMLDDVQKKLMSLANSSEGKVDKVLMRNLFIGHFHTPKNQRHEVLRLMGSILGVRREEMEQLFHDDQGSVTRWMTGWLGGGSKSVPNTPLRPNQQSVVNSSFSELFVKFLETESHPSIPPPKLSVHDMKPLDSPGRRKRDTNAPESFKDTAESRSGRRTDVNPFLAPRSAAVPSLLTQLDLDLVGPGIFF

SEQ ID NO: 831 - protein, 48 aa, Homo sapiens [sequence omitted]

SEQ ID NO: 832 - protein, 232 aa, Homo sapiens
MAPSVPAAEPEYPKGIRAVLLGPPGAGKGTQAPRLAENFCVCHLATGDMLRAMVASGSELGKKLKATMDAGKLVSDEMVVELIEKNLETPLCKNGFLLDGFPRTVRQAEMLDDLMEKRKEKLDSVIEFSIPDSLLIRRITGRLIHPKSGRSYHEEFNPPKEPMKDDITGEPLIRRSDDNEKALKIRLQAYHTQTTPLIEYYRKRGIHSAIDASQTPDVVFASILAAFSKATS

SEQ ID NO: 833 - protein, 806 aa, Homo sapiens
MSASPDDLSTGGRLQNMTVDECFQSRNTVLQGQPFGGVPTVLCLNIALWVLVLVVYSFLRKAAWDYGRLALLIHNDSLTSLIYGEQSEKTSPSETSLEMERRDKGFCSWFFNSITMKDEDLINKCGDDARIYIVFQYHLIIFVLIICIPSLGIILPINYTGSVLDWSSHFARTTIVNVSTESKLLWLHSLLSFFYFITNFMFMAHHCLGFAPRNSQKVTRTLMITYVPKDIEDPELIIKHFHEAYPGSVVTRVHFCYDVRNLIDLDDQRRHAMRGRLFYTAKAKKTGKVMIRIHPCARLCFCKCWTCFKEVDAEQYYSELEEQLTDEFNAELNRVPLKRLDLIFVTFQDSRMAKRVRKDYKYVQCGVQPQQSSVTTIVKSYYWRVTMAPHPKDIIWKHLSVRRFFWWARFIAINTFLFFLFFFLTTPAIIMNTIDMYNVTRPIEKLQNPIVTQFFPSVMLWGFTVILPLIVYFSAFLEAHWTRSSQNLVMVHKCYIFLVFMVVILPSMGLTSLDVFLRWLFDIYYLEQASIRFQCVFLPDNGAFFVNYVITAALLGTGMELLRLGSLFCYSTRLFFSRSEPERVNIRKNQAIDFQFGREYAWMMNVFSVVMAYSITCPIIVPFGLLYLCMKHLTDRYNMYYSFAPTKLNEQIHMAAVSQAIFAPLLGLFWMLFFSILRLGSLHAITIFSLSTLLIAMVIAFVGIFLGKLRMVADYEPEEEEIQTVFDMEPSSTSSTPTSLLYVATVLQEPELNLTPASSPARHTYGTMNNQPEEGEEESGLRGFARELDSAQFQEGLELEGQNQYH

SEQ ID NO: 834 - protein, 342 aa, Homo sapiens
MAEGGSGDVDDAGDCSGARYNDWSDDDDDSNESKSIVWYPPWARIGTEAGTRARARARARATRARRAVQKRASPNSDDTVLSPQELQKVLCLVEMSEKPYILEAALIALGNNAAYAFNRDIIRDLGGLPIVAKILNTRDPIVKEKALIVLNNLSVNAENQRRLKVYMNQVCDDTITSRLNSSVQLAGLRLLTNMTVTNEYQHMLANSISDFFRLFSAGNEETKLQVLKLLLNLAENPAMTRELLRAQVPSSLGSLFNKKENKEVILKLLVIFENINDNFKWEENEPTQNQFGEGSLFFFLKEFQVCADKVLGIESHHDFLVKVKVGKFMAKLAEHMFPKSQE

SEQ ID NO: 835 - protein, 392 aa, Homo sapiens [sequence omitted]

SEQ ID NO: 836 - protein, 226 aa, Homo sapiens [sequence omitted]

SEQ ID NO: 837 - protein, 813 aa, Homo sapiens
MDATALERDAVQFARLAVQRDHEGRYSEAVFYYKEAAQALIYAEMAGSSLENIQEKITEYLERVQALHSAVQSKSADPLKSKHQLDLERAHFLVTQAFDEDEKENVEDAIELYTEAVDLCLKTSYETADKVLQNKLKQLARQALDRAEALSEPLTKPVGKISSTSVKPKPPPVRAHFPLGANPFLERPQSFISPQSCDAQGQRYTAEEIEVLRTTSKINGIEYVPFMNVDLRERFAYPMPFCDRWGKLPLSPKQKTTFSKWVRPEDLTNNPTMIYTVSSFSIKQTIVSDCSFVASLAISAAYERRFNKKLITGIIYPQNKDGEPEYNPCGKYMVKLHLNGVPRKVIIDDQLPVDHKGELLCSYSNNKSELWVSLIEKAYMKVMGGYDFPGSNSNIDLHALTGWIPERIAMHSDSQTFSKDNSFRMLYQRFHKGDVLITASTGMMTEAEGEKWGLVPTHAYAVLDIREFKGLRFIQLKNPWSHLRWKGRYSENDVKNWTPELQKYLNFDPRTAQKIDNGIFWISWDDLCQYYDVIYLSWNPGLFKESTCIHSTWDAKQGPVKDAYSLANNPQYKLEVQCPQGGAAVWVLLSRHITDKDDFANNREFITMVVYKTDGKKVYYPADPPPYIDGIRINSPHYLTKIKLTTPGTHTFTLVVSQYEKQNTIHYTVRVYSACSFTFSKIPSPYTLSKRINGKWSGQSAGGCGNFQETHKNNPIYQFHIEKTGPLLIELRGPRQYSVGFEVVTVSTLGDPGPHGFLRKSSGDYRCGFCYLELENIPSGIFNIIPSTFLPKQEGPFFLDFNSIIPIKITQLQ

SEQ ID NO: 838 - protein, 953 aa, Homo sapiens
MTSATSPIILKWDPKSLEIRTLTVERLLEPLVTQVTTLVNTSNKGPSGKKKGRSKKAHVLAASVEQATQNFLEKGEQIAKESQDLKEELVAAVEDVRKQGETMRIASSEFADDPCSSVKRGTMVRAARALLSAVTRLLILADMADVMRLLSHLKIVEEALEAVKNATNEQDLANRFKEFGKKMVKLNYVAARRQQELKDPHCRDEMAAARGALKKNATMLYTASQAFLRHPDVAATRANRDYVFKQVQEAIAGISNAAQATSPTDEAKGHTGIGELAAALNEFDNKIILDPMTFSEARFRPSLEERLESIISGAALMADSSCTRDDRRERIVAECNAVRQALQDLLSEYMNNTGRKEKGDPLNIAIDKMTKKTRDLRRQLRKAVMDHISDSFLETNVPLLVLIEAAKSGNEKEVKEYAQVFREHANKLVEVANLACSISNNEEGVKLVRMAATQIDSLCPQVINAALTLAARPQSKVAQDNMDVFKDQWEKQVRVLTEAVDDITSVDDFLSVSENHILEDVNKCVIALQEGDVDTLDRTAGAIRGRAARVIHIINAEMENYEAGVYTEKVLEATKLLSETVMPRFAEQVEVAIEALSANVPQPFEENEFIDASRLVYDGVRDIRKAVLMIRTPEELEDDSDFEQEDYDVRRGTSVQTEDDQLIAGQSARAIMAQLPQEEKAKIAEQVEIFHQEKSKLDAEVAKWDDSGNDIIVLAKQMCMIMMEMTDFTRGKGPLKNTSDVINAAKKIAEAGSRMDKLARAVADQCPDSACKQDLLAYLQRIALYCHQLNICSKVKAEVQNLGGELIVSGTGVQSTFTTFYEVDCDVIDGGRASQLSTHLPTCAEGAPIGSGSSDSSMLDSATSLIQAAKNLMNAVVLTVKASYVASTKYQKVYGTAAVNSPVVSWKMKAPEKKPLVKREKPEEFQTRVRRGSQKKHISPVQALSEFKAMDSF

SEQ ID NO: 839 - protein, 655 aa, Homo sapiens
MGTSPSSSTALASCSRIARRATATMIAGSLLLLGFLSTTTAQPEQKASNLIGTYRHVDRATGQVLTCDKCPAGTYVSEHCTNTSLRVCSSCPVGTFTRHENGIEKCHDCSQPCPWPMIEKLPCAALTDRECTCPPGMFQSNATCAPHTVCPVGWGVRKKGTETEDVRCKQCARGTFSDVPSSVMKCKAYTDCLSQNLVVIKPGTKETDNVCGTLPSFSSSTSPSPGTAIFPRPEHMETHEVPSSTYVPKGMNSTESNSSASVRPKVLSSIQEGTVPDNTSSARGKEDVNKTLPNLQVVNHQQGPHHRHILKLLPSMEATGGEKSSTPIKGPKRGHPRQNLHKHFDINEHLPWMIVLFLLLVLVVIVVCSIRKSSRTLKKGPRQDPSAIVEKAGLKKSMTPTQNREKWIYYCNGHGIDILKLVAAQVGSQWKDIYQFLCNASEREVAAFSNGYTADHERAYAALQHWTIRGPEASLAQLISALRQHRRNDVVEKIRGLMEDTTQLETDKLALPMSPSPLSPSPIPSPNAKLENSALLTVEPSPQDKNKGFFVDESEPLLRCDSTSSGSSALSRNGSFITKEKKDTVLRQVRLDPCDLQPIFDDMLHFLNPEELRVIEEIPQAEDKLDRLFEIIGVKSQEASQTLLDSVYSHLPDLL

SEQ ID NO: 840 - protein, 148 aa, Homo sapiens
MGSLSGLRLAAGSCFRLCERDVSSSLRLTRSSDLKRINGFCTKPQESPGAPSRTYNRVPLHKPTDWQKKILIWSGRFKKEDEIPETVSLEMLDAAKNKMRVKISYLMIALTVVGCIFMVIEGKKAAQRHETLTSLNLEKKARLKEEQL

SEQ ID NO: 841 - protein, 145 aa, Homo sapiens
MVGRNSAIAAGVCGALFIGYCIYFDRKRRSDPNFKNRLRERRKKQKLAKERAGLSKLPDLKDAEAVQKFFLEEIQLGEELLAQGEYEKGVDHLTNAIAVCGQPQQLLQVLQQTLPPPVFQMLLTKLPTISQRIVSAQSLAEDDVE

SEQ ID NO: 842 - protein, 145 aa, Homo sapiens; identical to SEQ ID NO: 841

SEQ ID NO: 843 - protein, 1038 aa, Homo sapiens
  VARIANT 910: Xaa = Any Amino Acid
MWRCGGRQGLCVLRRLSGGHAHHRAWRWNSNRACERALQYKLGDKIHGFTVNQVTSVPELFLTAVKLTHDDTGARYLHLAREDTNNLFSVQFRTTPMDSTGVPHILEHTVLCGSQKYPCRNPFFKMLNRSLSTFMNAFTASDYTLYPFSTQNPKDFQNLLSVYLDATFSPCLRELDFWQEGWRLEHENPSDPQTPLVFKGVVFNEMKGAFTDNERIFSQHLQNRLLPDHTYSVVSGGDPLCIPELTWEQLKQFHATHYHPSNARFFTYGNFPLEQHLKQIHEEALSKFQKIEPSTVVPAQTPWDKPREFQITCGPDSFATDPSKQTTVSVSFLLPDITDTFEAFTLSLLSSLLTSGPNSPFYKALIESGLGTEFSPDVGYNGYTREAYFSVGLQGIVEKDIETVRSLIDRTIDEVVETRIEDDRIEALLHKIEIQMKHQSTSFGLMLTSYIASCWNHDGDPVELLKLGNQLAKFRQCLQENPKFLQEKVKQYFKNNQHKLTLSMRPDDKYHEKQAQVEATKLKQKVEALSPGDRQQIYEKGLELRSQQSKPQDASCLPALKVSDIEPTIPVTELDVVLTAGDIPVQYCAQPTNGMVYFRAFSSLNTLPEELRPYVPLFCSILTKLGCGLLDYREQAQQIELKTGGMSASPHVLPDDSHMDTYEQVGVLFSSLCLDRNLPDMMQLWSEIFNNPCFEEEEHFKVLVKMTAQELANGIPDSGHLYASIRAGRTLTPAGDLQETFSGMDQVRLMKRIAEMTDIKPILRKLPRIKKHLLNGDNMRCSVNATPQQMPQTEKAVEDFLRSIGRSKKERRPVRPHTVEKPVPSSSGGDAHVPHGSQVIRKLVMEPTFKPWQMKTHFLMPFPVNYVGECIRTVPYTDPDHASLKILARLMTAKFLHTEIREKGGAYGGXAKLSHNGIFTLYSYRDPNTIETLQSFGKAVDWAKSGKFTQQDIDEAKLSVFSTVDAPVAPSDKGMDHFLYGLSDEMKQAHREQLFAVSHDKLLAVSDRYLGTGKSTHGLAILGPENPKIAKDPSWIIR

SEQ ID NO: 844 - protein, 303 aa, Homo sapiens
MADAASQVLLGSGLTILSQPLMYVKVLIQVGYEPLPPTIGRNIFGRQVCQLPGLFSYAQHIASIDGRRGLFTGLTPRLCSGVLGTVVHGKVLQHYQESDKGEELGPGNVQKEVSSSFDHVIKETTREMIARSAATLITHPFHVITLRSMVQFIGRESKYCGLCDSIITIYREEGILGFFAGLVPRLLGDILSLWLCNSLAYLVNTYALDSGVSTMNEMKSYSQAVTGFFASMLTYPFVLVSNLMAVNNCGLAGGCPPYSPIYTSWIDCWCMLQKEGNMSRGNSLFFRKVPFGKTYCCDLKMLI

SEQ ID NO: 845 - protein, 303 aa, Homo sapiens; identical to SEQ ID NO: 844

SEQ ID NO: 846 - protein, 172 aa, Homo sapiens
MPGIVELPTLEELKVDEVKISSAVLKAAAHHYGAQCDKPNKEFMLCRWEEKDPRRCLEEGKLVNKCALDFFRQIKRHCAEPFTEYWTCIDYTGQQLFRHCRKQQAKFDECVLDKLGWVRPDLGELSKVTKVKTDRPLPENPYHSRPRPDPSPEIEGDLQPATHGSRFYFWTK

SEQ ID NO: 847 - protein, 428 aa, Homo sapiens
MDSLWGPGAGSHPFGVHNTRLSPDLCPGKIVLRALKESGAGMPEQDKDPRVQENPGDQRRVPEVTGDAPSAFRPLRDNGGLSPFVPGPGPLQTDLHAQRSEIRYNQTSQTSWTSSCTNRNAISSSYSSTGGLPGLKRRRGPASSHCQLTLSSSKTVSEDRPQAVSSGHTQCEKAADIAPGQTLTLRNDSSTSEASRPSTHKFPLLPCRRGEPLMLPPPLELGYRVTVEDLDREKEAAFQRINSALQVEDKAISDCRPSRPSHTLSSLATGASGLPAVSKAPSMDAQQETHKSQDCLGLLAPLASAAEVPSTAPMSGKKHRPPGPLFSSSDPLPATSSHSQDSAQVTSLIPAPFPAASMDAGMRRTRRGTSAPAAAAAAPPPSALNPTLGSLLEWMEALHISGPQPQLQQVPRGQNQRSQTSRTSSCPK

SEQ ID NO: 848 - protein, 93 aa, Homo sapiens
MGREFGNLTRMRHVISYSLSPFEQRAYPHVFTKGIPNVLRRIRESFFRVVPQFVVFYLIYTWGTEEFERSKRRIQLPMKMTNEQRIRMTVPCL

SEQ ID NO: 849 - protein, 3829 aa, Homo sapiens
MNTFWPGRELIVQWYPFDENRNHPSVSWLKMVWKNLYIHFSEDLTLFDEMPLIPRTILEEGQTCVELIRLRIPSLVILDDESEAQLPEFLADIVQKLGGFVLKKLDASIQHPLIKKYIHSPLPSAVLQIMEKMPLQKLCNQITSLLPTHKDALRKFLASLTDSSEKEKRIIQELAIFKRINHSSDQGISSYTKLKGCKVLHHTAKLPADLRLSISVIDSSDEATIRLANMLKIEQLKTTSCLKLVLKDIENAFYSHEEVTQLMLWVLENLSSLKNENPNVLEWLTPLKFIQISQEQMVSAGELFDPDIEVLKDLFCNEEGTYFPPSVFTSPDILHSLRQIGLKNEASLKEKDVVQVAKKIEALQVGACPDQDVLLKKAKTLLLVLNKNHTLLQSSEGKMTLKKIKWVPACKERPPNYPGSLVWKGDLCNLCAPPDMCDVGHAILIGSSLPLVESIHVNLEKALGIFTKPSLSAVLKHFKIVVDWYSSKTFSDEDYYQFQHILLEIYGFMHDHLNEGKDSFRALKFPWVWTGKKFCPLAQAVIKPIHDLDLQPYLHNVPKTMAKFHQLFKVCGSIEELTSDHISMVIQKIYLKSDQDLSEQESKQNLHLMLNIIRWLYSNQIPASPNTPVPIHHSKNPSKLIMKPIHECCYCDIKVDDLNDLLEDSVEPIILVHEDIPMKTAEWLKVPCLSTRLINPENMGFEQSGQREPLTVRIKNILEEYPSVSDIFKELLQNADDANATECSFLIDMRRNMDIRENLLDPGMAACHGPALWSFNNSQFSDSDFVNITRLGESLKRGEVDKVGKFGLGFNSVYHITDIPIIMSREFMIMFDPNINHISKHIKDKSNPGIKINWSKQQKRLRKFPNQFKPFIDVFGCQLPLTVEAPYSYNGTLFRLSFRTQQEAKVSEVSSTCYNTADIYSLVDEFSLCGHRLIIFTQSVKSMYLKYLKIEETNPSLAQDTVIIKKKSCSSKALNTPVLSVLKEAAKLMKTCSSSNKKLPSDEPKSSCILQITVEEFHHVFRRIADLQSPLFRGPDDDPAALFEMAKSGQSKKPSDELSQKTVECTTWLLCTCMDTGEALKFSLSESGRRLGLVPCGAVGVQLSEIQDQKWTVKPHIGEVFCYLPLRIKTGLPVHINGCFAVTSNRKEIWKTDTKGRWNTTFMRHVIVKAYLQVLSVLRDLATSGELMDYTYYAVWPDPDLVHDDFSVICQGFYEDIAHGKGKELTKVFSDGSTWVSMKNVRFLDDSILKRRDVGSAAFKIFLKYLKKTGSKNLCAVELPSSVKLGFEEAGCKQILLENTFSEKQFFSEVFFPNIQEIEAELRDPLMIFVLNEKVDEFSGVLRVTPCIPCSLEGHPLVLPSRLIHPEGRVAKLFDIKDGRFPYGSTQDYLNPIILIKLVQLGMAKDDILWDDMLERAVSVAEINKSDHVAACLRSSILLSLIDEKLKIRDPRAKDFAAKYQTIRFLPFLTKPAGFSLDWKGNSFKPETMFAATDLYTAEHQDIVCLLQPILNENSHSFRGCGSVSLAVKEFLGLLKKPTVDLVINQLKEVAKSVDDGITLYQENITNACYKYLHEALMQNEITKMSIIDKLKPFSFILVENAYVDSEKVSFHLNFEAAPYLYQLPNKYKNNFRELFETVGVRQSCTVEDFALVLESIDQERGTKQITEENFQLCRRIISEGIWSLIREKKQEFCEKNYGKILLPDTNLMLLPAKSLCYNDCPWIKVKDTTVKYCHADIPREVAVKLGAVPKRHKALERYASNVCFTTLGTEFGQKEKLTSRIKSILNAYPSEKEMLKELLQNADDAKATEICFVFDPRQHPVDRIFDDKWAPLQGPALCVYNNQPFTEDDVRGIQNLGKGTKEGNPYKTGQYGIGFNSVYHITDCPSFISGNDILCIFDPHARYAPGATSISPGRMFRDLDADFRTQFSDVLDLYLGTHFKLDNCTMFRFPLRNAEMAKVSEISSVPASDRMVQNLLDKLRSDGAELLMFLNHMEKISICEIDKSTGALNVLYSVKGKITDGDRLKRKQFHASVIDSVTKKRQLKDIPVQQITYTMDTEDSEGNLTTWLICNRSGFSSMEKVSKSVISAHKNQDITLFPRGGVAACITHNYKKPHRAFCFLPLSLETGLPFHVNGHFALDSARRNLWRDDNGVGVRSDWNNSLMTALIAPAYVELLIQLKKRYFPGSDPTLSVLQNTPIHVVKDTLKKFLSFFPVNRLDLQPDLYCLVKALYNCIHEDMKRLLPVVRAPNIDGSDLHSAVIITWINMSTSNKTRPFFDNLLQDELQHLKNADYNITTRKTVAENVYRLKHLLLEIGFNLVYNCDETANLYHCLIDADIPVSYVTPADIRSFLMTFSSPDTNCHIGKLPCRLQQTNLKLFHSLKLLVDYCFKDAEENEIEVEGLPLLITLDSVLQTFDAKRPKFLTTYHELIPSRKDLFMNTLYLKYSNILLNCKVAKVFDISSFADLLSSVLPREYKTKSCTKWKDNFASESWLKNAWHFISESVSVKEDQEETKPTFDIVVDTLKDWALLPGTKFTVSANQLVVPEGDVLLPLSLMHIAVFPNAQSDKVFHALMKAGCIQLALNKICSKDSAFVPLLSCHTANIESPTSILKALHYMVQTSTFRAEKLVENDFEALLMYFNCNLNHLMSQDDIKILKSLPCYKSISGRYVSIGKFGTCYVLTKSIPSAEVEKWTQSSSSAFLEEKIHLKELYEVIGCVPVDDLEVYLKHLLPKIENLSYDAKLEHLIYLKNRLSSAEELSEIKEQLFEKLESLLIIHDANSRLKQAKHFYDRTVRVFEVMLPEKLFIPNDFFKKLEQLIKPKNHVTFMTSWVEFLRNIGLKYILSQQQLLQFAKEISVRANTENWSKETLQNTVDILLHHIFQERMDLLSGNFLKELSLIPFLCPERAPAEFIRFHPQYQEVNGTLPLIKFNGAQVNPKFKQCDVLQLLWTSCPILPEKATPLSIKEQEGSDLGPQEQLEQVLNMLNVNLDPPLDKVINNCRNICNITTLDEEMVKTRAKVLRSIYEFLSAEKREFRFQLRGVAFVMVEDGWKLLKPEEVVINLEYESDFKPYLYKLPLELGTFHQLFKHLGTEDIISTKQYVEVLSRIFKNSEGKQLDPNEMRTVKRVVSGLFRSLQNDSVKVRSDLENVRDLALYLPSQDGRLVKSSILVFDDAPHYKSRIQGNIGVQMLVDLSQCYLGKDHGFHTKLIMLFPQKLRPRLLSSILEEQLDEETPKVCQFGALCSLQGRLQLLLSSEQFITGLIRIMKHENDNAFLANEEKAIRLCKALREGLKVSCFEKLQTTLRVKGFNPIPHSRSETFAFLKRFGNAVILLYIQHSDSKDINFLLALAMTLKSATDNLISDTSYLIAMLGCNDIYRIGEKLDSLGVKYDSSEPSKLELPMPGTPIPAEIHYTLLMDPMNVFYPGEYVGYLVDAEGGDIYGSYQPTYTYAIIVQEVEREDADNSSFLGKIYQIDIGYSEYKIVSSLDLYKFSRPEESSQSRDSAPSTPTSPTEFLTPGLRSIPPLFSGRESHKTSSKHQSPKKLKVNSLPEILKEVTSVVEQAWKLPESERKKIIRRLYLKWHPDKNPENHDIANEVFKHLQNEINRLEKQAFLDQNADRASRRTFSTSASRFQSDKYSFQRFYTSWNQEATSHKSERQQQNKEKCPPSAGQTYSQRFFVPPTFKSVGNPVEARRWLRQARANFSAARNDLHKNANEWVCFKCYLSTKLALIAADYAVRGKSDKDVKPTALAQKIEEYSQQLEGLTNDVHTLEAYGVDSLKTRYPDLLPFPQIPNDRFTSEVAMRVMECTACIIIKLENFMQQKV

SEQ ID NO: 850 - protein, 242 aa, Homo sapiens
MGEASPPAPARRHLLVLLLLLSTLVIPSAAAPIHDADAQESSLGLTGLQSLLQGFSRLFLKGNLLRGIDSLFSAPMDFRGLPGNYHKEENQEHQLGNNTLSSHLQIDKMTDNKTGEVLISENVVASIQPAEGSFEGDLKVPRMEEKEALVPIQKATDSFHTELHPRVAFWIIKLPRRRSHQDALEGGHWLSEKRHRLQAIRDGLRKGTHKDVLEEGTESSSHSRLSPRKTHLLYILRPSRQL

SEQ ID NO: 851 - protein, 963 aa, Homo sapiens
MAAQRIRAANSNGLPRCKSEGTLIDLSEGFSETSFNDIKVPSPSALLVDNPTPFGNAKEVIAIKDYCPTNFTTLKFSKGDHLYVLDTSGGEWWYAHNTTEMGYIPSSYVQPLNYRNSTLSDSGMIDNLPDSPDEVAKELELLGGWTDDKKVPGRMYSNNPFWNGVQTNPFLNGNVPVMPSLDELNPKSTVDLLLFDAGTSSFTESSSATTNSTGNIFDELPVTNGLHAEPPVRRDNPFFRSKRSYSLSELSVLQAKSDAPTSSSFFTGLKSPAPEQFQSREDFRTAWLNHRKLARSCHDLDLLGQSPGWGQTQAVETNIVCKLDSSGGAVQLPDTSISIHVPEGHVAPGETQQISMKALLDPPLELNSDRSCSISPVLEVKLSNLEVKTSIILEMKVSAEIKNDLFSKSTVGLQCLRSDSKEGPYVSVPLNCSCGDTVQAQLHNLEPCMYVAVVAHGPSILYPSTVWDFINKKVTVGLYGPKHIHPSFKTVVTIFGHDCAPKTLLVSEVTRQAPNPAPVALQLWGKHQFVLSRPQDLKVCMFSNMTNYEVKASEQAKVVRGFQLKLGKVSRLIFPITSQNPNELSDFTLRVQVKDDQEAILTQFCVQTPQPPPKSAIKPSGQRRFLKKNEVGKIILSPFATTTKYPTFQDRPVSSLKFGKLLKTVVRQNKNHYLLEYKKGDGIALLSEERVRLRGQLWTKEWYIGYYQGRVGLVHTKNVLVVGRARPSLCSGPELSTSVLLEQILRPCKFLTYIYASVRTLLMENISSWRSFADALGYVNLPLTFFCRAELDSEPERVASVLEKLKEDCNNTENKERKSFQKELVMALLKMDCQGLVVRLIQDFVLLTTAVEVAQRWRELAEKLAKVSKQQMDAYESPHRDRNGVVDSEAMWKPAYDFLLTWSHQIGDSYRDVIQELHLGLDKMKNPITKRWKHLTGTLILVNSLDVLRAAAFSPADQDDFVI

SEQ ID NO: 852 - protein, 675 aa, Homo sapiens
MAAAKVALTKRADPAELRTIFLKYASIEKNGEFFMSPNDFVTRYLNIFGESQPNPKTVELLSGVVDQTKDGLISFQEFVAFESVLCAPDALFMVAFQLFDKAGKGEVTFEDVKQVFGQTTIHQHIPFNWDSEFVQLHFGKERKRHLTYAEFTQFLLEIQLEHAKQAFVQRDNARTGRVTAIDFRDIMVTIRPHVLTPFVEECLVAAAGGTTSHQVSFSYFNGFNSLLNNMELIRKIYSTLAGTRKDVEVTKEEFVLAAQKFGQVTPMEVDILFQLADLYEPRGRMTLADIERIAPLEEGTLPFNLAEAQRQKASGDSARPVLLQVAESAYRFGLGSVAGAVGATAVYPIDLVKTRMQNQRSTGSFVGELMYKNSFDCFKKVLRYEGFFGLYRGLLPQLLGVAPEKAIKLTVNDFVRDKFMHKDGSVPLAAEILAGGCAGGSQVIFTNPLEIVKIRLQVAGEITTGPRVSALSVVRDLGFFGIYKGAKACFLRDIPFSAIYFPCYAHVKASFANEDGQVSPGSLLLAGAIAGMPAASLVTPADVIKTRLQVAARAGQTTYSGVIDCFRKILREEGPKALWKGAGARVFRSSPQFGVTLLTYELLQRWFYIDFGGVKPMGSEPVPKSRINLPAPNPDHVGGYKLAVATFAGIENKFGLYLPLFKPSVSTSKAIGGGP

SEQ ID NO: 853 - protein, 383 aa, Homo sapiens
MERRARSSSRESRGRGGRTPHKENKRAKAERSGGGRGRQEAGPEPSGSGRAGTPGEPRAPAATVVDVDEVRGSGEEGTEVVALLESERPEEGTKSSGLGACEWLLVLISLLFIIMTFPFSIWFCVKVVQEYERVIIFRLGHLLPGRAKGPGLFFFLPCLDTYHKVDLRLQTLEIPFHEIVTKDMFIMEIDAICYYRMENASLLLSSLAHVSKAVQFLVQTTMKRLLAHRSLTEILLERKSIAQDAKVALDSVTCIWGIKVERIEIKDVRLPAGLQHSLAVEAEAQRQAKVRMIAAEAEKAASESLRMAAEILSGTPAAVQLRYLHTLQSLSTEKPSTVVLPLPFDLLNCLSSPSNRTQGSLPFPSPSKPVEPLNPKKKDSPML

SEQ ID NO: 854 - protein, 127 aa, Homo sapiens [sequence omitted]

SEQ ID NO: 855 - protein, 127 aa, Homo sapiens [sequence omitted]

SEQ ID NO: 856 - protein, 184 aa, Homo sapiens
MREYKLVVLGSGGVGKSALTVQFVQGIFVEKYDPTIEDSYRKQVEVDAQQCMLEILDTAGTEQFTAMRDLYMKNGQGFALVYSITAQSTFNDLQDLREQILRVKDTDDVPMILVGNKCDLEDERVVGKEQGQNLARQWNNCAFLESSAKSKINVNEIFYDLVRQINRKTPVPGKARKKSSCQLL

SEQ ID NO: 857 - protein, 196 aa, Homo sapiens
MFIQTQDTPNPNSLKFIPGKPVLETRTMDFPTPAAAFRSPLARQLFRIEGVKSVFFGPDFITVTKENEELDWNLLKPDIYATIMDFFASGLPLVTEETPSGEAGSEEDDEVVAMIKELLDTRIRPTVQEDGGDVIYKGFEDGIVQLKLQGSCTSCPSSIITLKNGIQNMLQFYIPEVEGVEQVMDDESDEKEANSP

SEQ ID NO: 858 - protein, 106 aa, Homo sapiens
MASSGAGDPLDSKRGEAPFAQRIDPTREKLTPEQLHSMRQAELAQWQKVLPRRRTRNIVTGLGIGALVLAIYGYTFYSISQERFLDELEDEAKAARARALARASGS

SEQ ID NO: 859 - protein, 106 aa, Homo sapiens; identical to SEQ ID NO: 858

SEQ ID NO: 860 - protein, 188 aa, Homo sapiens
MAVADLALIPDVDIDSDGVFKYVLIRVHSAPRSGLRLQRARRSCAATSGLSTMRTSTTKCRATCRSKAATVSVWAAGASPTRVRTRRFTCTAIPWPMVLPSTPFQLRKSKPSTPTTRSPGLTTATEHSQPGACCLQQPLQSPAFACTPLAGLALPAPAAASGDVLSTRPWRQASLATELNVLPHLPAS

SEQ ID NO: 861 - protein, 903 aa, Homo sapiens
MASVWQRLGFYASLLKRQLNGGPDVIKWERRVIPGCTRSIYSATGKWTKEYTLQTRKDVEKWWHQRIKEQASKISEADKSKPKFYVLSMFPYPSGKLHMGHVRVYTISDTIARFQKMRGMQVINPMGWDAFGLPAENAAVERNLHPQSWTQSNIKHMRKQLDRLGLCFSWDREITTCLPDYYKWTQYLFIKLYEAGLAYQKEALVNWDPVDQTVLANEQVDEHGCSWRSGAKVEQKYLRQWFIKTTAYAKAMQDALADLPEWYGIKGMQAHWIGDCVGCHLDFTLKVHGQATGEKLTAYTATPEAIYGTSHVAISPSHRLLHGHSSLKEALRMALVPGKDCLTPVMAVNMLTQQEVPVVILAKADLEGSLDSKIGIPSTSSEDTILAQTLGLAYSEVIETLPDGTERLSSSAEFTGMTRQDAFLALTQKARGKRVGGDVTSDKLKDWLISRQRYWGTPIPIVHCPVCGPTPVPLEDLPVTLPNIASFTGKGGPPLAMASEWVNCSCPRCKGAAKRETDTMDTFVDSAWYYFRYTDPHNPHSPFNTAVADYWMPVDLYIGGKEHAVMHLFYARFFSHFCHDQKMVKHREPFHKLLAQGLIKGQTFRLPSGQYLQREEVDLTGSVPVHAKTKEKLEVTWEKMSKSKHNGVDPEEVVEQYGIDTIRLYILFAAPPEKDILWDVKTDALPGVLRWQQRLWTLTTRFIEARASGKSPQPQLLSNKEKAEARKLWEYKNSVISQVTTHFTEDFSLNSAISQLMGLSNALSQASQSVILHSPEFEDALCALMVMAAPLAPHVTSEIWAGLALVPRKLCAHYTWDASVLLQAWPAVDPEFLQQPEVVQMAVLINNKACGKIPVPQQVARDQDKVHEFVLQSELGVRLLQGRSIKKSFLSPRTALINFLVQD

SEQ ID NO: 862 - protein, 903 aa, Homo sapiens; identical to SEQ ID NO: 861

SEQ ID NO: 863 - protein, 2209 aa, Homo sapiens
MWNDIELLTNDDTGSGYLSVGSRKEHGTALYQVDLLVKISSEKASLNPKIQACSLSDGFIIVADQSVILLDSICRSLQLHLVFDTEVDVVGLCQEGKFLLVGERSGNLHLIHVTSKQTLLTNAFVQKANDENRRTYQNLVIEKDGSNEGTYYMLLLTYSGFFCITNLQLLKIQQAIENVDFSTAKKLQGQIKSSFISTENYHTLGCLSLVAGDLASEVPVIIGGTGNCAFSKWEPDSSKKGMTVKNLIDAEIIKGAKKFQLIDNLLFVLDTDNVLSLWDIYTLTPVWNWPSLHVEEFLLTTEADSPSSVTWQGITNLKLIALTASANKKMKNLMVYSLPTMEILYSLEVSSVSSLVQTGISTDTIYLLEGVCKNDPKLSEDSVSVLVLRCLTEALPENRLSRLLHKHRFAEAESFAIQFGLDVELVYKVKSNHILEKLALSSVDASEQTEWQQLVDDAKENLHKIQDDEFVVNYCLKAQWITYETTQEMLNYAKTRLLKKEDKTALIYSDGLKEVLRAHAKLTTFYGAFGPEKFSGSSWIEFLNNEDDLKDIFLQLKEGNLVCAQYLWLRHRANFESRFDVKMLESLLNSMSASVSLQKLCPWFKNDVIPFVRRTVPEGQIILAKWLEQAARNLELTDKANWPENGLQLAEIFFTAEKTDELGLASSWHWISLKDYQNTEEVCQLRTLVNNLRELITLHRKYNCKLALSDFEKENTTTIVFRMFDKVLAPELIPSILEKFIRVYMREHDLQEEELLLLYIEDLLNRCSSKSTSLFETAWEAKAMAVIACLSDTDLIFDAVLKIMYAAVVPWSAAVEQLVKQHLEMDHPKVKLLQESYKLMEMKKLLRGYGIREVNLLNKEIMRVVRYILKQDVPSSLEDALKVAQAFMLSDDEIYSLRIIDLIDREQGEDCLLLLKSLPPAEAEKTAERVIIWARLALQEEPDHSKEGKAWRMSVAKTSVDILKILCDIQKDNLQKKDECEEMLKLFKEVASLQENFEVFLSFEDYSNSSLVADLREQHIKAHEVAQAKHKPGSTPEPIAAEVRSPSMESKLHRQALALQMSKQELEAELTLRALKDGNIKTALKKCSDLFKYHCNADTGKLLFLTCQKLCQMLADNVPVTVPVGLNLPSMIHDLASQAATICSPDFLLDALELCKHTLMAVELSRQCQMDDCGILMKASFGTHKDPYEEWSYSDFFSEDGIVLESQMVLPVIYELISSLVPLAESKRYPLESTSLPYCSLNEGDGLVLPVINSISALLQNLQESSQWELALRFVVGSFGTCLQHSVSNFMNATLSEKLFGETTLVKSRHVVMELKEKAVIFIRENATTLLHKVFNCRLVDLDLALGYCTLLPQKDVFENLWKLIDKAWQNYDKILAISLVGSELASLYQEIEMGLKFRELSTDAQWGIRLGKLGISFQPVFRQHFLTKKDLIKALVENIDMDTSLILEYCSTFQLDCDAVLQLFIETLLHNTNAGQGQGDASMDSAKRRHPKLLAKALEMVPLLTSTKDLVISLSGILHKLDPYDYEMIEVVLKVIERADEKITNININQALSILKHLKSYRRISPPVDLEYQYMLEHVITLPSAAQTRLPFHLIFFGTAQNFWKILSTELSEESFPTLLLISKLMKFSLDTLYVSTAKHVFEKKLKPKLLKLTQAKSSTLINKEITKITQTIESCLLSIVNPEWAVAIAISLAQDIPEGSFKISALKFCLYLAERWLQNIPSQDEKREKAEALLKKLHIQYRRSGTEAVLIAHKLNTEEYLRVIGKPAHLIVSLYEHPSINQRIQNSSGTDYPDIHAAAKEIAEVNEINLEKVWDMLLEKWLCPSTKPGEKPSELFELQEDEALRRVQYLLLSRPIDYSSRMLFVFATSTTTTLGMHQLTFAHRTRALQCLFYLADKETIESLFKKPIEEVKSYLRCITFLASFETLNIPITYELFCSSPKEGMIKGLWKNHSHESMAVRLVTELCLEYKIYDLQLWNGLLQKLLGFNMIPYLRKVLKAISSIHSLWQVPYFSKAWQRVIQIPLLSASCPLSPDQLSDCSESLIAVLECPVSGDLDLIGVARQYIQLELPAFALACLMLMPHSEKRHQQIKNFLGSCDPQVILKQLEEHMNTGQLAGFSHQIRSLILNNIINKKEFGILAKTKYFQMLKMHAMNTNNITELVNYLANDLSLDEASVLITEYSKHCGKPVPPDTAPCEILKMFLSGLS

SEQ ID NO: 864 - protein, 370 aa, Homo sapiens
MAITLEEAPWLGWLLVKALMRFAFMVVNNLVAIPSYICYVIILQPLRVLDSKRFWYIEGIMYKWLLGMVASWGWYAGYTVMEWGEDIKAVSKDEAVMLVNHQATGDVCTLMMCLQDKGLVVAQMMWLMDHIFKYTNFGIVSLVHGDFFIRQGRSYRDQQLLLLKKHLENNYRSRDRKWIVLFPEGGFLRKRRETSQAFAKKNNLPFLTNVTLPRSGATKIILNALVAQQKNGSPAGGDAKELDSKSKGLQWIIDTTIAYPKAEPIDIQTWILGYRKPTVTHVHYRIFPIKDVPLETDDLTTWLYQRFVEKEDLLSHFYETGAFPPSKGHKEAVSREMTLSNLWIFLIQSFAFLSGYMWYNIIQYFYHCLF

SEQ ID NO: 865 - protein, 1121 aa, Homo sapiens
MHSDEMIYDDVENGDEGGNSSLEYGWSSSEFESYEEQSDSECKNGIPRSFLRSNHKKQLSHDLTRLKEHYEKKMRDLMASTVGVVEIQQLRQKHELKMQKLVKAAKDGTKDGLERTRAAVKRGRSFIRTKSLIAQDHRSSLEEEQNLFIDVDCKHPEAILTPMPEGLSQQQVVRRYILGSVVDSEKNYVDALKRILEQYEKPLSEMEPKVLSERKLKTVFYRVKEILQCHSLFQIALASRVSEWDSVEMIGDVFVASFSKSMVLDAYSEYVNNFSTAVAVLKKTCATKPAFLEFLKQEQEASPDRTTLYSLMMKPIQRFPQFILLLQDMLKNTSKGHPDRLPLQMALTELETLAEKLNERKRDADQRCEVKQIAKAINERYLNKLLSSGSRYLIRSDDMIETVYNDRGEIVKTKERRVFMLNDVLMCATVSSRPSHDSRVMSSQRYLLKWSVPLGHVDAIEYGSSAGTGEHSRHLAVHPPESLAVVANAKPNKVYMGPGQLYQDLQNLLHDLNVIGQITQLIGNLKGNYQNLNQSVAHDWTSGLQRLILKKEDEIRAADCCRIQLQLPGKQDKSGRPTFFTAVFNTFTPAIKESWVNSLQMAKLALEEENHMGWFCVEDDGNHIKKEKHPLLVGHMPVMVAKQQEFKIECAAYNPEPYLNNESQPDSFSTAHGFLWIGSCTHQMGQIAIVSFQNSTPKVIECFNVESRILCMLYVPVEEKRREPGAPPDPETPAVRASDVPTICVGTEEGSISIYKSSQGSKKVRLQHFFTPEKSTVMSLACTSQSLYAGLVNGAVASYARAPDGSWDSEPQKVIKLGVLPVRSLLMMEDTLWAASGGQVFIISVETHAVEGQLEAHQEEGMVISHMAVSGVGIWIAFTSGSTLRLFHTETLKHLQDINIATPVHNMLPGHQRLSVTSLLVCHGLLMVGTSLGVLVALPVPRLQGIPKVTGRGMVSYHAHNSPVKFIVLATALHEKDKDKSRDSLAPGPEPQDEDQKDALPSGGAGSSLSQGDPDAAIWLGDSLGSMTQKSDLSSSSGSLSLSHGSSSLEHRSEDSTIYDLLKDPVSLRSKARRAKKAKASSALVVCGGQGHRRVHRKARQPHQEELAPTVMVWQIPLLNI

SEQ ID NO: 866 - protein, 2715 aa, Homo sapiens
MAAAAGGGSCPGPGSARGRFPGRPRGAGGGGGRGGRGNGAERVRVALRRGGGATGPGGAEPGEDTALLRLLGLRRGLRRLRRLWAGPRVQRGRGRGRGRGWGPSRGCVPEEESSDGESDEEEFQGFHSDEDVAPSSLRSALRSQRGRAPRGRGRKHKTTPLPPPRLADVAPTPPKTPARKRGEEGTERMVQALTELLRRAQAPQAPRSRACEPSTPRRSRGRPPGRPAGPCRRKQQAVVVAEAAVTIPKPEPPPPVVPVKHQTGSWKCKEGPGPGPGTPRRGGQSSRGGRGGRGRGRGGGLPFVIKFVSRAKKVKMGQLSLGLESGQGQGQHEESWQDVPQRRVGSGQGGSPCWKKQEQKLDDEEEEKKEEEEKDKEGEEKEERAVAEEMMPAAEKEEAKLPPPPLTPPAPSPPPPLPPPSTSPPPPLCPPPPPPVSPPPLPSPPPPPAQEEQEESPPPVVPATCSRKRGRPPLTPSQRAEREAARAGPEGTSPPTPTPSTATGGPPEDSPTVAPKSTTFLKNIRQFIMPVVSARSSRVIKTPRRFMDEDPPKPPKVEVSPVLRPPITTSPPVPQEPAPVPSPPRAPTPPSTPVPLPEKRRSILREPTFRWTSLTRELPPPPPAPPPPPAPSPPPAPATSSRRPLLLRAPQFTPSEAHLKIYESVLTPPPLGAPEAPEPEPPPADDSPAEPEPRAVGRTNHLSLPRFAPVVTTPVKAEVSPHGAPALSNGPQTQAQLLQPLQALQTQLLPQALPPPQPQLQPPPSPQQMPPLEKARIAGVGSLPLSGVEEKMFSLLKRAKVQLFKIDQQQQQKVAASMPLSPGGQMEEVAGAVKQISDRGPVRSEDESVEAKRERPSGPESPVQGPRIKHVCRHAAVALGQARAMVPEDVPRLSALPLRDRQDLATEDTSSASETESVPSRSRRGKVEAAGPGGESEPTGSGGTLAHTPRRSLPSHHGKKMRMARCGHCRGCLRVQDCGSCVNCLDKPKFGGPNTKKQCCVYRKCDKIEARKMERLAKKGRTIVKTLLPWDSDESPEASPGPPGPRRGAGAGGPREEVVAHPGPEEQDSLLQRKSARRCVKQRPSYDIFEDSDDSEPGGPPAPRRRTPRENELPLPEPEEQSRPRKPTLQPVLQLKARRRLDKDALAPGPFASFPNGWTGKQKSPDGVHRVRVDFKEDCDLENVWLMGGLSVLTSVPGGPPMVCLLCASKGLHELVFCQVCCDPFHPFCLEEAERPLPQHHDTWCCRRCKFCHVCGRKGRGSKHLLECERCRHAYHPACLGPSYPTRATRKRRHWICSACVRCKSCGATPGKNWDVEWSGDYSLCPRCTQLYEKGNYCPICTRCYEDNDYESKMMQCAQCDHWVHAKCEGLSDEDYEILSGLPDSVLYTCGPCAGAAQPRWREALSGALQGGLRQVLQGLLSSKVVGPLLLCTQCGPDGKQLHPGPCGLQAVSQRFEDGHYKSVHSFMEDMVGILMRHSEEGETPDRRAGGQMKGLLLKLLESAFGWFDAHDPKYWRRSTRLPNGVLPNAVLPPSLDHVYAQWRQQEPETPESGQPPGDPSAAFQGKDPAAFSHLEDPRQCALCLKYGDADSKEAGRLLYIGQNEWTHVNCAIWSAEVFEENDGSLKNVHAAVARGRQMRCELCLKPGATVGCCLSSCLSNFHFMCARASYCIFQDDKKVFCQKHTDLLDGKEIVNPDGFDVLRRVYVDFEGINFKRKFLTGLEPDAINVLIGSIRIDSLGTLSDLSDCEGRLFPIGYQCSRLYWSTVDARRRCWYRCRILEYRPWGPREEPAHLEAAEENQTIVHSPAPSSEPPGGEDPPLDTDVLVPGAPERHSPIQNLDPPLRPDSGSAPPPAPRSFSGARIKVPNYSPSRRPLGGVSFGPLPSPGSPSSLTHHIPTVGDPDFPAPPRRSRRPSPLAPRPPPSRWASPPLKTSPQLRVPPPTSVVTALTPTSGELAPPGPAPSPPPPEDLGPDFEDMEVVSGLSAADLDFAASLLGTEPFQEEIVAAGAMGSSHGGPGDSSEEESSPTSRYIHFPVTVVSAPGLAPSATPGAPRIEQLDGVDDGTDSEAEAVQQPRGQGTPPSGPGVVRAGVLGAAGDRARPPEDLPSEIVDFVLKNLGGPGDGGAGPREESLPPAPPLANGSQPSQGLTASPADPTRTFAWLPGAPGVRVLSLGPAPEPPKPATSKIILVNKLGQVFVKMAGEGEPVPPPVKQPPLPPTISPTAPTSWTLPPGPLLGVLPVVGVVRPAPPPPPPPLTLVLSSGPASPPRQAIRVKRVSTFSGRSPPAPPPYKAPRLDEDGEASEDTPQVPGLGSGGFSRVRMKTPTVRGVLDLDRPGEPAGEESPGPLQERSPLLPLPEDGPPQVPDGPPDLLLESQWHHYSGEASSSEEEPPSPDDKENQAPKRTGPHLRFEISSEDGFSVEAESLEGAWRTLIEKVQEARGHARLRHLSFSGMSGARLLGIHHDAVIFLAEQLPGAQRCQHYKFRYHQQGEGQEEPPLNPHGAARAEVYLRKCTFDMFNFLASQHRVLPEGATCDEEEDEVQLRSTRRATSLELPMAMRFRHLKKTSKEAVGVYRSAIHGRGLFCKRNIDAGEMVIEYSGIVIRSVLTDKREKFYDGKGIGCYMFRMDDFDVVDATMHGNAARFINHSCEPNCFSRVIHVEGQKHIVIFALRRILRGEELTYDYKFPIEDASNKLPCNCGAKRCRRFLN

SEQ ID NO: 867 - protein, 1300 aa, Homo sapiens
MEEASLCLGVSSAEPEAEPHLSGPVLNGQYAMSQKLHQITSQLSHAFPELHPRPNPEEKPPASLEEKAHVPMSGQPMGSQMALLANQLGREVDTSLNGRVDLQQFLNGQNLGIMSQMSDIEDDARKNRKYPCPLCGKRFRFNSILSLHMRTHTGEKPFKCPYCDHRAAQKGNLKIHLRTHKLGNLGKGRGRVREENRLLHELEERAILRDKQLKGSLLQPRPDLKPPPHAQQAPLAACTLALQANHSVPDVAHPVPSPKPASVQEDAVAPAAGFRCTFCKGKFKKREELDRHIRILHKPYKCTLCDFAASQEEELISHVEKAHITAESAQGQGPNGGGEQSANEFRCEVCGQVFSQAWFLKGHMRKHKDSFEHCCQICGRRFKEPWFLKNHMKVHLNKLSVKNKSPSDPEVPVPMGGMSQEAHANLYSRYLSCLQSGFMTPDKAGLSEPSQLYGKGELPMKEKEALGKLLSPISSMAHGVPEGDKHSLLGCLNLVPPLKSSCIERLQAAAKAAEMDPVNSYQAWQLMARGMAMEHGFLSKEHPLQRNHEDTLANAGVLFDKEKREYVLVGADGSKQKMPADLVHSTKVGSQRDLPSKLDPLESSRDFLSHGLNQTLEYNLQGPGNMKEKPTECPDCGRVFRTYHQVVVHSRVHKRDRKGEEDGLHVGLDERRGSGSDQESQSVSRSTTPGSSNVTEESGVGGGLSQTGSAQEDSPHPSSPSSSDIGEEAGRSAGVQQPALLRDRSLGSAMKDCPYCGKTFRTSHHLKVHLRIHTGEKPYKCPHCDYAGTQSASLKYHLERHHRERQNGAGPLSGQPPNQDHKDEMSSKASLFIRPDILRGAFKGLPGIDFRGGPASQQWTSGVLSSGDHSGQATGMSSEVPSDALKGTDLPSKSTHFSEIGRAYQSIVSNGVNFQGSLQAFMDSFVLSSLKKEKDMKDKALADPPSMKVHGVDGGEEKPSGKSSQRKSEKSQYEPLDLSVRPDAASLPGSSVTVQDSIAWHGCLFCAFTTSSMELMALHLQANHLGKAKRKDNTIGVTVNCKDQAREASKMALLPSLQSNKDLGLSNMISSLDSASEKMAQGQLKETLGEQKSGAWTGHVDPAFCNFPSDFYKQFGVYPGMVGSGASSSCPNKEPDGKAHSEEDVPILIPETTSKNTTDDLSDIASSEDMDSSKGENNDEEDVETEPEMMTKPLSALSKDSSSDGGDSLQPTGTSQPVQGLVSPLSQAPEKQWHSQGLLQAQDPLAGLPKPERGPQSLDKPMNMLSVLRAYSSDGLAAFNGLASSTANSGCIKRPDLCGK

SEQ ID NO: 868 - protein, 1047 aa, Homo sapiens
MDAEAEDKTLRTRSKGTEVPMDSLIQELSVAYDCSMAKKRTAEDQALGVPVNKRKSLLMKPRHYSPKADCQEDRSDRTEDDGPLETHGHSTAEEIMIKPMDESLLSTAQENSSRKEDRYSCYQELMVKSLMHLGKFEKNVSVQTVSENLNDSGIQSLKAESDEADECFLIHSDDGRDKIDDSQPPFCSSDDNESNSESAENGWDSGSNFSEETKPPRVPKYVLTDHKKDLLEVPEIKTEGDKFIPCENRCDSETERKDPQNALAEPLDGNAQPSFPDVEEEDSESLAVMTEEGSDLEKAKGNLSLLEQAIALQAERGCVFHNTYKELDRFLLEHLAGERRQTKVIDMGGRQIFNNKHSPRPEKRETKCPIPGCDGTGHVTGLYPHHRSLSGCPHKVRVPLEILAMHENVLKCPTPGCTGRGHVNSNRNTHRSLSGCPIAAAEKLAMSQDKNQLDSPQTGQCPDQAHRTSLVKQIEFNFPSQAITSPRATVSKEQEKFGKVPFDYASFDAQVFGKRPLIQTVQGRKTPPFPESKHFPNPVKFPNRLPSAGAHTQSPGRASSYSYGQCSEDTHIAAAAAILNLSTRCREATDILSNKPQSLHAKGAEIEVDENGTLDLSMKKNRILDKSAPLTSSNTSIPTPSSSPFKTSSILVNAAFYQALCDQEGWDTPINYSKTHGKTEEEKEKDPVSSLENLEEKKFPGEASIPSPKPKLHARDLKKELITCPTPGCDGSGHVTGNYASHRSVSGCPLADKTLKSLMAANSQELKCPTPGCDGSGHVTGNYASHRSLSGCPRARKGGVKMTPTKEEKEDPELKCPVIGCDGQGHISGKYTSHRTASGCPLAAKRQKENPLNGASLSWKLNKQELPHCPLPGCNGLGHVNNVFVTHRSLSGCPLNAQVIKKGKVSEELMTIKLKATGGIESDEEIRHLDEEIKELNESNLKIEADMMKLQTQITSMESNLKTIEEENKLIEQNNESLLKELAGLSQALISSLADIQLPQMGPISEQNFEAYVNTLTDMYSNLERDYSPECKALLESIKQAVKGIHV

SEQ ID NO: 869 - protein, 1533 aa, Homo sapiens [sequence omitted]

SEQ ID NO: 870 - protein, 1533 aa, Homo sapiens [sequence omitted]

SEQ ID NO: 871 - protein, 590 aa, Homo sapiens
MHSMISSVDVKSEVPVGLEPISPLDLRTDLRMMMPVVDPVVREKQLQQELLLIQQQQQIQKQLLIAEFQKQHENLTRQHQAQLQEHIKELLAIKQQQELLEKEQKLEQQRQEQEVERHRREQQLPPLRGKDRGRERAVASTEVKQKLQEFLLSKSATKDTPTNGKNHSVSRHPKLWYTAAHHTSLDQSSPPLSGTSPSYKYTLPGAQDAKDDFPLRKTASEPNLKVRSRLKQKVAERRSSPLLRRKDGNVVTSFKKRMFEVTESSVSSSSPGSGPSSPNNGPTGSVTENETSVLPPTPHAEQMVSQQRILIHEDSMNLLSLYTSPSLPNITLGLPAVPSQLNASNSLKEKQKCETQTLRQGVPLPGQYGGSIPASSSHPHVTLEGKPPNSSHQALLQHLLLKEQMRQQKLLVAGGVPLHPQSPLATKERISPGIRGTHKLPRHRPLNRTQSAPLPQSTLAQLVIQQQHQQFLEKQKQYQQQIHMNKLLSKSIEQLKQPGSHLEEAEEELQGDQAMQEDRAPSSGNSTRSDSSACVDDTLGQVGAVKVKEEPVDSDEDAQIQEMESGEQAAFMQQVIGKDLAPGFVIKVII

SEQ ID NO: 872 - protein, 1124 aa, Homo sapiens
MGENEDEKQAQAGQVFENFVQASTCKGTLQAFNILTRHLDLDPLDHRNFYSKLKSKVTTWKAKALWYKLDKRGSHKEYKRGKSCTNTKCLIVGGGPCGLRTAIELAYLGAKVVVVEKRDSFSRNNVLHLWPFTIHDLRGLGAKKFYGKFCAGSIDHISIRQLQLILFKVALMLGVEIHVNVEFVKVLEPPEDQENQKIGWRAEFLPTDHSLSEFEFDVIIGADGRRNTLEGFRRKEFRGKLAIAITANFINRNSTAEAKVEEISGVAFIFNQKFFQDLKEETGIDLENIVYYKDCTHYFVMTAKKQSLLDKGVIINDYIDTEMLLCAENVNQDNLLSYAREAADFATNYQLPSLDFAMNHYGQPDVAMFDFTCMYASENAALVRERQAHQLLVALVGDSLLEPFWPMGTGCARGFLAAFDTAWMVKSWNQGTPPLELLAERESLYRLLPQTTPENINKNFEQYTLDPGTRYPNLNSHCVRPHQVKHLYITKELEHYPLERLGSVRRSVNLSRKESDIRPSKLLTWCQQQTEGYQHVNVTDLTTSWRSGLALCAIIHRFRPELINFDSLNEDDAVENNQLAFDVAEREFGIPPVTTGKEMASAQEPDKLSMVMYLSKFYELFRGTPLRPVDSWRKNYGENADLSLAKSSISNNYLNLTFPRKRTPRVDGQTGENDMNKRRRKGFTNLDEPSNFSSRSLGSNQECGSSKEGGNQNKVKSMANQLLAKFEESTRNPSLMKQERRVSGIGKPVLCSSSGPPVHSCCPKPEEATPSPSPPLKRQFPSVVVTGHVLRELKQVSAGSECLSRPWRARAKSDLQLGGTENFATLPSTRPRAQALSGVLWRLQQVEEKILQKRAQNLANREFHTKNIKEKAAHLASMFGHGDFPQNKLLSKGLSHTHPPSPPSRLPSPDPAASSSPSTVDSASPARKEKKSPSGFHFHPSHLRTVHPQLTVGKVSSGIGAAAEVLVNLYMNDHRPKAQATSPDLESMRKSFPLNLGGSDTCYFCKKRVYVMERLSAEGHFFHRECFRCSICATTLRLAAYTFDCDEGKFYCKPHFIHCKTNSKQRKRRAELKQQREEEATWQEQEAPRRDTPTESSCAVAAIGTLEGSPPVHFSLPVLHPLLG

SEQ ID NO: 873 - protein, 652 aa, Homo sapiens
MINAQELLTLEDVTVEFTWEEWQLLGPFQKDLYRDVMLEIYSNLLSMGYQVSKPDALSKLERGEEPWTMEDERHSRICPENNEVDDHLQDHLENQRMLKSVEQYHEHNAFGNTASQTKSLCLFRENHDTFELYIKTLKSNLSLVNQNKSCEINNSTKFSGDGKSFLHGNYEELYSAAKFSVSTKANSTKSQVSKHQRTHEIEKNHVCSECGKAFVKKSQLTDHERVHTGEKPYGCTLCAKVFSRKSRLNEHQRIHKREKSFICSECGKVFTMKSRLIEHQRTHTGEKPYICNECGKGFPGKRNLIVHQRNHTGEKSYICSECGKGFTGKSMLIIHQRTHTGEKPYICSECGKGFTTKHYVIIHQRNHTGEKPYICNECGKGFTMKSRMIEHQRTHTGEKPYICSECGKGFPRKSNLIVHQRNHTVEKSYLCSECGKGFTVKSMLIIHQRTHTGEKPYTCSECGKGFPLKSRLIVHQRTHTGEKPYRCSECGKGFIVNSGLMLHQRTHTGEKPYICNECGKGFAFKSNLVVHQRTHTGEKPFMCSECGKGFTMKRYLIVHQQIHTEEKSCICSECGRGFAKETELALHKQVHTGEKPYGCNECGKGFTMKSRLIVHQRTHTGEKPFVCSECRKAFSSKRNLIVHQRTHNGNKP

SEQ ID NO: 874 - protein, 1186 aa, Homo sapiens
MSKLKVIPEKSLTNNSRIVGLLAQLEKINAEPSESDTARYVTSKILHLAQSQEKTRREMTAKGSTGMEILLSTLENTKDLQTTLNILSILVELVSAGGGRRVSFLVTKGGSQILLQLLMNASKESPPHEDLMVQIHSILAKIGPKDKKFGVKARINGALNITLNLVKQNLQNHRLVLPCLQLLRVYSANSVNSVSLGKNGVVELMFKIIGPFSKKNSSLIKVALDTLAALLKSKTNARRAVDRGYVQVLLTIYVDWHRHDNRHRNMLIRKGILRSLKSVTNIKLGRKAFIDANGMKILYNTSQLPVIPVTGPVAQLYSLPPEVDDVVDESDDNDDIDVEAENETENEDDLDQNFKNDDIETDINKLKPQQEPGRTIEDLKMYEHLFPELVDDFQDYDLISKEPKPFVFEGKVRGPIVVPTAGEGTSGNSGNLRKVVMKENISSKGDEGEKKSTFMDLAKEDIKDNDRTLQQQPGDQNRTISSVHGLNNDIVKALDRITLQNIPSQTAPGFTAEMKKDCSLPLTVLTCAKACPHMATCGNVLFEGRTVQLGKLCCTGVGTEDDEDTESNSSVEQASVEVPDGPTLHDPDLYIEIVKNTKSVPEYSEVAYPDYFGHIPPPFKEPILERPYGVQRTKIAQDIERLIHQSDIIDRVVYDLDNPNYTIPEEGDILKFNSKFESGNLRKVIQIRKNEYDLILNSDINSNHYHQWFYFEVSGMRPGVAYRFNIINCEKSNSQFNYGMQPLMYSVQEALNARPWWIRMGTDICYYKNHFSRSSVAAGGQKGKSYYTITFTVNFPHKDDVCYFAYHYPYTYSTLQMHLQKLESAHNPQQIYFRKDVLCETLSGNSCPLVTITAMPESNYYEHICHFRNRPYVFLSARVHPGETNASWVMKGTLEYLMSNNPTAQSLRESYIFKIVPMLNPDGVINGNHRCSLSGEDLNRQWQSPSPDLHPTIYHAKGLLQYLAAVKRLPLVYCDYHGHSRKKNVFMYGCSIKETVWHTNDNATSCDVVEDTGYRTLPKILSHIAPAFCMSSCSFVVEKSKESTARVVVWREIGVQRSYTMESTLCGCDQGKYKGLQIGTRELEEMGAKFCVGLLRLKRLTSPLEYNLPSSLLDFENDLIESSCKVTSPTTYVLDEDEPRFLEEVDYSAESNDELDIELAENVGDYEPSAQEEVLSDSELSRTYLP

SEQ ID NO: 875 - protein, 823 aa, Homo sapiens
MALPRCTWPNYVWRAVMACLVHRGLGAPLTLCMLGCLLQAGHVLSQKLDDVDPLVATNFGKIRGIKKELNNEILGPVIQFLGVPYAAPPTGERRFQPPEPPSPWSDIRNATQFAPVCPQNIIDGRLPEVMLPVWFTNNLDVVSSYVQDQSEDCLYLNIYVPTEDDIRDSGGPKPVMVYIHGGSYMEGTGNLYDGSVLASYGNVIVITVNYRLGVLGFLSTGDQAAKGNYGLLDLIQALRWTSENIGFFGGDPLRITVFGSGAGGSCVNLLTLSHYSEGNRWSNSTKGLFQRAIAQSGTALSSWAVSFQPAKYARMLATKVGCNVSDTVELVECLQKKPYKELVDQDIQPARYHIAFGPVIDGDVIPDDPQILMEQGEFLNYDIMLGVNQGEGLKFVENIVDSDDGISASDFDFAVSNFVDNLYGYPEGKDVLRETIKFMYTDWADRHNPETRRKTLLALFTDHQWVAPAVATADLHSNFGSPTYFYAFYHHCQTDQVPAWADAAHGDEVPYVLGIPMIGPTELFPCNFSKNDVMLSAVVMTYWTNFAKTGDPNQPVPQDTKFIHTKPNRFEEVAWTRYSQKDQLYLHIGLKPRVKEHYRANKVNLWLELVPHLHNLNDISQYTSTTTKVPSTDITFRPTRKNSVPVTSAFPTAKQDDPKQQPSPFSVDQRDYSTELSVTIAVGASLLFLNILAFAALYYKKDKRRHDVHRRCSPQRTTTNDLTHAQEEEIMSLQMKHTDLDHECESIHPHEVVLRTACPPDYTLAMRRSPDDVPLMTPNTITMIPNTIPGIQPLHTFNTFTGGQNNTLPHPHPHPHSHSTTRV

SEQ ID NO: 876 - protein, 764 aa, Homo sapiens
MEESSSVAMLVPDIGEQEAILTAESIISPSLEIDEQRKTKPDPLIHVIQKLSKIVENEKSQKCLLIGKKRPRSSAATHSLETQELCEIPAKVIQSPAADTRRAEMSQTNFTPDTLAQNEGKAMSYQCSLCKFLSSSFSVLKDHIKQHGQQNEVILMCSECHITSRSQEELEAHVVNDHDNDANIHTQSKAQQCVSPSSSLCRKTTERNETIPDIPVSVDNLQTHTVQTASVAEMGRRKWYAYEQYGMYRCLFCSYTCGQQRMLKTHAWKHAGEVDCSYPIFENENEPLGLLDSSAAAAPGGVDAVVIAIGESELSIHNGPSVQVQICSSEQLSSSSPLEQSAERGVHLSQSVTLDPNEEEMLEVISDAEENLIPDSLLTSAQKIISSSPNKKGHVNVIVERLPSAEETLSQKRFLMNTEMEEGKDLSLTEAQIGREGMDDVYRADKCTVDIGGLIIGWSSSEKKDELMNKGLATDENAPPGRRRTNSESLRLHSLAAEALVTMPIRAAELTRANLGHYGDINLLDPDTSQRQVDSTLAAYSKMMSPLKNSSDGLTSLNQSNSTLVALPEGRQELSDGQVKTGISMSLLTVIEKLRERTDQNASDDDILKELQDNAQCQPNSDTSLSGNNVVEYIPNAERPYRCRLCHYTSGNKGYIKQHLRVHRQRQPYQCPICEHIADNSKDLESHMIHHCKTRIYQCKQCEESFHYKSQLRNHEREQHSLPDTLSIATSNEPRISSDTADGKCVQEGIYVFCYAGCSDLHMT

SEQ ID NO: 877 - protein, 99 aa, Homo sapiens
MDLIGFGYAALVTFGSIFGYKRRGGVPSLIAGLFVGCLAGYGAYRVSNDKRDVKVSLFTAFFLATIMGVRFKRSKKIMPAGLVAGLSLMMILRLVLLLL

SEQ ID NO: 878 - protein, 258 aa, Homo sapiens
MAASVLNTVLRRLPMLSLFRGSHRVQVPLQTLCTKAPSEEDSLSSVPISPYKDEPWKYLESEEYQERYGSRPVWADYRRNHKGGVPPQRTRKTCIRRNKVVGNPCPICRDHKLHVDFRNVKLLEQFVCAHTGIIFYAPYTGVCVKQHKRLTQAIQKARDHGLLIYHIPQVEPRDLDFSTSHGAVSATPPAPTLVSGDPWYPWYNWKQPPERELSRLRRLYQGHLQEESGPPPESMPKMPPRTPAEASSTGQTGPQSAL

SEQ ID NO: 879 - protein, 608 aa, Homo sapiens
MAASKPVEAAVVAAAVPSSGSGVGGGGTAGPGTGGLPRWQLALAVGAPLLLGAGAIYLWSRQQRRREARGRGDASGLKRNSERKTPEGRASPAPGSGHPEGPGAHLDMNSLDRAQAAKNKGNKYFKAGKYEQAIQCYTEAISLCPTEKNVDLSTFYQNRAAAFEQLQKWKEVAQDCTKAVELNPKYVKALFRRAKAHEKLDNKKECLEDVTAVCILEGFQNQQSMLLADKVLKLLGKEKAKEKYKNREPLMPSPQFIKSYFSSFTDDIISQPMLKGEKSDEDKDKEGEALEVKENSGYLKAKQYMEEENYDKIISECSKEIDAEGKYMAEALLLRATFYLLIGNANAAKPDLDKVISLKEANVKLRANALIKRGSMYMQQQQPLLSTQDFNMAADIDPQNADVYHHRGQLKILLDQVEEAVADFDECIRLRPESALAQAQKCFALYRQAYTGNNSSQIQAAMKGFEEVIKKFPRCAEGYALYAQALTDQQQFGKADEMYDKCIDLEPDNATTYVHKGLLQLQWKQDLDRGLELISKAIEIDNKCDFAYETMGTIEVQRGNMEKAIDMFNKAINLAKSEMEMAHLYSLCDAAHAQTEVAKKYGLKPPTL

SEQ ID NO: 880 - protein, 608 aa, Homo sapiens; identical to SEQ ID NO: 879

SEQ ID NO: 881 - protein, 741 aa, Homo sapiens
MDIEDEENMSSSSTDVKENRNLDNVSPKDGSTPGPGEGSQLSNGGGGGPGRKRPLEEGSNGHSKYRLKKRRKTPGPVLPKNALMQLNEIKPGLQYTLLSQTGPVHAPLFVMSVEVNGQVFEGSGPTKKKAKLHAAEKALRSFVQFPNASEAHLAMGRTLSVNTDFTSDQADFPDTLFNGFETPDKAEPPFYVGSNGDDSFSSSGDLSLSASPVPASLAQPPLPVLPPFPPPSGKNPVMILNELRPGLKYDFLSESGESHAKSFVMSVVVDGQFFEGSGRNKKLAKARAAQSALAAIFNLHLDQTPSRQPIPSEGLQLHLPQVLADAVSRLVLGKFGDLTDNFSSPHARRKVLAGVVMTTGTDVKDAKVISVSTGTKCINGEYMSDRGLALNDCHAEIISRRSLLRFLYTQLELYLNNKDDQKRSIFQKSERGGFRLKENVQFHLYISTSPCGDARIFSPHEPILEGSRSYTQAGVQWCNHGSLQPRPPGLLSDPSTSTFQGAGTTEPADRHPNRKARGQLRTKIESGEGTIPVRSNASIQTWDGVLQGERLLTMSCSDKIARWNVVGIQGSLLSIFVEPIYFSSIILGSLYHGDHLSRAMYQRISNIEDLPPLYTLNKPLLSGISNAEARQPGKAPNFSVNWTVGDSAIEVINATTGKDELGRASRLCKHALYCRWMRVHGKVPSHLLRSKITKPNVYHESKLAAKEYQAAKARLFTAFIKAGLGAWVEKPTEQDQFSLTP

SEQ ID NO: 882 - protein, 335 aa, Homo sapiens
MGKVKVGVNGFGRIGRLVTRAAFNSGKVDIVAINDPFIDLNYMVYMFQYDSTHGKFHGTVKAENGKLVINGNPITIFQERDPSKIKWGDAGAEYVVESTGVFTTMEKAGAHLQGGAKRVIISAPSADAPMFVMGVNHEKYDNSLKIISNASCTTNCLAPLAKVIHDNFGIVEGLMTTVHAITATQKTVDGPSGKLWRDGRGALQNIIPASTGAAKAVGKVIPELNGKLTGMAFRVPTANVSVVDLTCRLEKPAKYDDIKKVVKQASEGPLKGILGYTEHQVVSSDFNSDTHSSTFDAGAGIALNDHFVKLISWYDNEFGYSNRVVDLMAHMASKE

SEQ ID NO: 883 - protein, 462 aa, Homo sapiens
MSERKEGRGKGKGKKKERGSGKKPESAAGSQSPALPPRLKEMKSQESAAGSKLVLRCETSSEYSSLRFKWFKNGNELNRKNKPQNIKIQKKPGKSELRINKASLADSGEYMCKVISKLGNDSASANITIVESNEIITGMPASTEGAYVSSESPIRISVSTEGANTSSSTSTSTTGTSHLVKCAEKEKTFCVNGGECFMVKDLSNPSRYLCKCQPGFTGARCTENVPMKVQNQEKAEELYQKRVLTITGICIALLVVGIMCVVAYCKTKKQRKKLHDRLRQSLRSERNNMMNIANGPHHPNPPPENVQLVNQYVSKNVISSEHIVEREAETSFSTSHYTSTAHHSTTVTQTPSHSWSNGHTESILSESHSVIVMSSVENSRHSSPTGGPRGRLNGTGGPRECNSFLRHARETPDSYRDSPHSERHNLIAELRRNKAHRSKCMQIQLSATHLRSSSIPHLGFIL

SEQ ID NO: 884 - protein, 452 aa, Homo sapiens
MAAGEPRSLLFFQKPVTFEDVAVNFTQEEWDCLDASQRVLYQDVMSETFKNLTSVARIFLHKPELITKLEQEEEQWRETRVLQASQAGPPFFCYTCGKCFSRRSYLYSHQFVHNPKLTNSCSQCGKLFRSPKSLSYHRRMHLGERPFCCTLCDKTYCDASGLSRHRRVHLGYRPHSCSVCGKSFRDQSELKRHQKIHQNQEPVDGNQECTLRIPGTQAEFQTPIARSQRSIQGLLDVNHAPVARSQEPIFRTEGPMAQNQASVLKNQAPVTRTQAPITGTLCQVARSNSHPVKPSRLNVFCCPHCSLTFSKKSYLSRHQKAHLTEPPNYCFHCSKSFSSFSRLVRHQQTHWKQKSYLCPICDLSFGEKEGLMDHWRGYKGKDLCQSSHHKCRVILGQWLGFSHDVPTMAGEEWKHGGDQSPPRIHTPRRRGLREKACKGDKTKEAVSILKHK

SEQ ID NO: 885 - protein, 278 aa, Homo sapiens
DEYLGSLGLFRKLTAKDASCLFRAISEQLFCSQVHHLEIRKACVSYMRENQQTFESYVEGSFEKYLERLGDPKESAGQLEIRALSLIYNRDFILYRFPGKPPTYVTDNGYEDKILLCYSSSGHYDSVYSKQFQSSAAVCQAVLYEILYKDVFVVDEEELKTAIKLFRSGSKKNRNNAVTGSEDAHTDYKSSNQNRMEEWGACYNAENIPEGYNKGTEETKSPENPSKMPFPYKVLKALDPEIYRNVEFDVWLDSRKELQKSDYMEYAGRQYYLGDKCQ

SEQ ID NO: 886 - protein, 373 aa, Homo sapiens [sequence omitted]

SEQ ID NO: 887 - protein, 993 aa, Homo sapiens
SLWGTPRLPCSPGWQGATKRLLVRSVSGASNHQPNSNSGRYRDTVLLPQTSFPMKLLGRQQPDTELEIQQKCGFSELYSWQRERKVKTEFCLHDGPPYANGDPHVGHALNKILKDIANRFHMMNGSKIHFVPGWDCHGLPIEIKVLSELGREAQNLSAMEIRKKARSFAKAAIEKQKSAFIRWGIMADWNNCYYTFDGKYEAKQLRTFYQMYDKGLVYRSYKPVFWSPSSRTALAEAELEYNPEHVSRSIYVKFPLLKPSPKLASLIDGSSPVSILVWTTQPWTIPANEAVCYMPESKYAVVKCSKSGDLYVLAADKVASVASTLETTFETISTLSGVDLENGTCSHPLIPDKASPLLPANHVTMAKGTGLVHTAPAHGMEDYGVASQHNLPMDCLVDEDGVFTDVAGPELQNKAVLEEGTDVVIKMLQTAKNLLKEEKLVHSYPYDWRTKKPVVIRASKQWFINITDIKTAAKELLKKVKFIPGSALNGMVEMMDRRPYWCISRQRVWGVPIPVFHHKTKDEYLINSQTTEHIVKLVEQHGSDIWWTLPPEQLLPKEVLSEVGGPDALEYVPGQDILDIWFDSGTSWSYVLPGPDQRADLYLEGKDQLGGWFQSSLLTSVAARKRAPYKTVIVHGFTLGEKGEKMSKSLGNVIHPDVVVNGGQDQSKEPPYGADVLRWWVADSNVFTEVAIGPSVLNAARDDISKLRNTLRFLLGNVADFNPETDSIPVNDMYVIDQYMLHLLQDLANKITELYKQYDFGKVVRLLRTFYTRELSNFYFSIIKDRLYCEKENDPKRRSCQTALVEILDVIVRSFAPILPHLAEEVFQHIPYIKEPKSVFRTGWISTSSIWKKPGLEEAVESACAMRDSFLGSIPGKNAAEYKVITVIEPGLLFEIIEMLQSEETSSTSQLNELMMASESTLLAQEPREMTADVIELKGKFLINLEGGDIREESSYKVIVMPTTKEKCPRCWKYTAESSDTLCPRCAEVVSGK

SEQ ID NO: 888 - protein, 586 aa, Homo sapiens [sequence omitted]

SEQ ID NO: 889 - protein, 112 aa, Homo sapiens
MQDTGSVVPLHWFGFGYAALVASGGIIGYVKAGSVPSLAAGLLFGSLAGLGAYQLSQDPRNVWVFLATSGTLAGIMGMRFYHSGKFMPAGLIAGASLLMVAKVGVSMFNRPH

SEQ ID NO: 890 - protein, 468 aa, Homo sapiens
MAARLVSRCGAVRAAPHSGPLAVLAQVVRRSTDTVYDVVVSGGGLVGAAMACALGYDIHFHDKKILLLEAGPKKVLEKLSETYSNRVSSISPGSATLLSSFGAWDHICNMRYRAFRRMQVWDACSEALIMFDKDNLDDMGYIVENDVIMHALTKQLEAVSDRVTVLYRSKAIRYTWPCPFPMADSSPWVHITLGDGSTFQTKLLIGADGHNSGVRQAVGIQNVSWNYDQSAVVATLHLSEATENNVAWQRFLPSGPIALLPLSDTLSSLVWSTSHEHAAELVSMDEEKFVDAVNSAFWSDADHTDFIDTAGAMLQYPVSLLKPTKVSARQLPPSVPWVDAKSRVLFPLGLGHAAEYVRPRVALIGDAAHRVHPLAGQGVNMGFGDISSLAHHLSTAAFNGKDLGSVSHLTGYETERQRHNTALLAATDLLKRLYSTSASPLVLLRTWGLQATNAVSPLKEQIMAFASK

SEQ ID NO: 891 - protein, 208 aa, Homo sapiens
MGEVEISGPGYVKMCLHAARYPHAAVNGLFLAPATGSGECLCLTDCVPLFHSHLALSVMLEVALNQVDVWGAQAGLVVAGYYHANAAVNDQSPGPLALKIAGRIAEFFPDAVLIMLDNQKLVPQPRVPPVIVLENQGLRWVPKDKNLVMWRDWEESRQMVGALLEDRAHQHLVDFDCHLDDIRQDWTNQRLNTQITQWVGPTNGNGNA

SEQ ID NO: 892 - protein, 137 aa, Homo sapiens
MVHLTTLLCKAYRGGHLTIRLALGGCTNRPFYRIVAAHNKCPRDGRFVEQLGSYDPLPNSHGEKLVALNLDRIRHWIGCGAHLSKPMEKLLGLAGFFPLHPMMITNAERLRRKRAREVLLASQKTDAEATDTEATET

SEQ ID NO: 893 - protein, 137 aa, Homo sapiens; identical to SEQ ID NO: 892

SEQ ID NO: 894 - protein, 504 aa, Homo sapiens
MRLTPFSLSTGNSFRYSRRLKKNIFGTAPALRVSEMSLRPSSRIFPCFSRNGLDFTIVITLAQPPVPGISFIVAKPRLFPGAGSAGCGLLERLFLSLLLGTGLRWCLRGCFPGARFCSTTSPEGHTTFTGLRRSARTQRLAQGPKPGPPAATVARQTSRVSPAPPCSLRPGLRHESAPSGIGDVTARGALRGLGCTVRVTAACGGNHGCSQMLHFVFKVGNRFQTARFYRDVLGMKVLRHEEFEEGCKAACNGPYDGKWSKTMVGFGPEDDHFVAELTYNYGVGDYKLGNDFMGITLASSQAVSNARKLEWPLTEVAEGVFETEAPGGYKFYLQNRSLPQSDPVLKVTLAVSDLQKSLNYWCNLLGMKIYEKDEEKQRALLGYADNQCKLELQGVKGGVDHAAAFGRIAFSCPQKELPDLEDLMKRENQKILTPLVSLDTPGKATVQVVILADPDGHEICFVGDEAFRELSKMDPEGSKLLDDAMAADKSDEWFAKHNKPKASG

SEQ ID NO: 895 - protein, 226 aa, Homo sapiens
MGPLPRTVELFYDVLSPYSWLGFEILCRYQNIWNINLQLRPSLITGIMKDSGNKPPGLLPRKGLYMANDLKLLRHHLQIPIHFPKDFLSVMLEKGSLSAMRFLTAVNLEHPEMLEKASRELWMRVWSRNEDITEPQSILAAAEKAGMSAEQAQGLLEKIATPKVKNQLKETTEAACRYGAFGLPITVAHVDGQTHMLFGSDRMELLAHLLGEKWMGPIPPAVNARL

SEQ ID NO: 896 - protein, 242 aa, Homo sapiens
MVAPAVKVARGWSGLALGVRRAVLQLPGLTQVRWSRYSPEFKDPLIDKEYYRKPVEELTEEEKYVRELKKTQLIKAAPAGKTSSVFEDPVISKFTNMMMIGGNKVLARSLMIQTLEAVKRKQFEKYHAASAEEQATIERNPYTIFHQALKNCEPMIGLVPILKGGRFYQVPVPLPDRRRRFLAMKWMITECRDKKHQRTLMPEKLSHKLLEAFHNQGPVIKRKHDLHKMAEANRALAHYRWW

SEQ ID NO: 897 - protein, 379 aa, Homo sapiens
MLRFLGEKAAAKRQVLNADSVEQSFVGLKQLISCRNWRAAVDLCGRLLTAHGQGYGKSGLLTSHTTDSLQLWFVRLALLVKLGLFQNAEMEFEPVGNLDQPDLYYEYYPHVYPGRRGSMVPFSMRILHADLQQYLGNPQESLDRLHKVKTVCSKILANLEQGLAEDGGMSSVTQEGRQASIRLWRSRLGRVMYSMANCLLLMKDYVLAVEAYHSVIKYYPEQEPQLLSGIGRISLQIGDIKTAEKYFQDVEKVTQKLDGLQGKIMVLMNSAFLHLGQNNFAEAHRFFTEILRMDPRNAVANNNAAVCLLYLGKLKDSLRQLEAMVQQDPRHYLHESVLFNLTTMYELESSRSMQKKQALLEAVAGKEGDSFNTQCLKLA

SEQ ID NO: 898 - protein, 296 aa, Homo sapiens
MATSSAALPRILGAGARAPSRWLGFLGKATPRPARPSRRTLGSATALMIRESEDSTDFNDKILNEPLKHSDFFNVKELFSVRSLFDARVHLGHKAGCRHRFMEPYIFGSRLDHDIIDLEQTATHLQLALNFTAHMAYRKGIILFISRNRQFSYLIENMARDCGEYAHTRYFRGGMLTNARLLFGPTVRLPDLIIFLHTLNNIFEPHVAVRDAAKMNIPTVGIVDTNCNPCLITYPVPGNDDSPLAVHLYCRLFQTAITRAKEKRQQVEALYRLQGQKEPGDQGPAHPPGADMSHSL

SEQ ID NO: 899 - protein, 296 aa, Homo sapiens; identical to SEQ ID NO: 898

SEQ ID NO: 900 - protein, 273 aa, Homo sapiens
MRGSQEVLLMWLLVLAVGGTEHAYRPGRRVCAVRAHGDPVSESFVQRVYQPFLTTCDGHRACSTYRTIYRTAYRRSPGLAPARPRYACCPGWKRTSGLPGACGAAICQPPCRNGGSCVQPGRCRCPAGWRGDTCQSDVDECSARRGGCPQRCVNTAGSYWCQCWEGHSLSADGTLCVPKGGPPRVAPNPTGVDSAMKEEVQRLQSRVDLLEEKLQLVLAPLHSLASQALEHGLPDPGSLLVHSFQQLGRIDSLSEQISFLEEQLGSCSCKKDS

SEQ ID NO: 901 - protein, 209 aa, Homo sapiens
MALLAEHLLKPLPADKQIETGPFLEAVSHLPPFFDCLGSPVFTPIKADISGNITKIKAVYDTNPAKFRTLQNILEVEKEMYGAEWPKVGATLALMWLKRGLRFIQVFLQSICDGERDENHPNLIRVNATKAYEMALKKYHGWIVQKIFQAALYAAPYKSDFLKALSKGQNVTEEECLEKIRLFLVNYTATIDVIYEMYTQMNAELNYKV

SEQ ID NO: 902 - protein, 148 aa, Homo sapiens
MASVVLALRTRTAVTSLLSPTPATALAVRYASKKSGGSSKNLGGKSSGRRQGIKKMEGHYVHAGNIIATQRHFRWHPGAHVGVGKNKCLYALEEGIVRYTKEVYVPHPRNTEAVDLITRLPKGAVLYKTFVHVVPAKPEGTFKLVAML

SEQ ID NO: 903 - protein, 111 aa, Homo sapiens
MADWARAQSPGAVEEILDRENKRMADSLASKVTRLKSLALDIDRDAEDQNRYLDGMDSDFTSMTSLLTGSVKRFSTMARSGQDNRKLLCGMAVGLIVAFFILSYFLSRART

SEQ ID NO: 904 - protein, 581 aa, Homo sapiens
MPAPRAREQPRVPGERQPLLPRGARGPRRWRRAAGAAVLLVEMLERAAFFGVTANLVLYLNSTNFNWTGEQATRAALVFLGASYLLAPVGGWLADVYLGRYRAVALSLLLYLAASGLLPATAFPDGRSSFCGEMPASPLGPACPSAGCPRSSPSPYCAPVLYAGLLLLGLAASSVRSNLTSFGADQVMDLGRDATRRFFNWFYWSINLGAVLSLLVVAFIQQNISFLLGYSIPVGCVGLAFFIFLFATPVFITKPPMGSQVSSMLKLALQNCCPQLWQRHSARDRQCARVLADERSPQPGASPQEDIANFQVLVKILPVMVTLVPYWMVYFQMQSTYVLQGLHLHIPNIFPANPANISVALRAQGSSYTIPEAWLLLANVVVVLILVPLKDRLIDPLLLRCKLLPSALQKMALGMFFGFTSVIVAGVLEMERLHYIHHNETVSQQIGEVLYNAAPLSIWWQIPQYLLIGISEIFASIPGLEFAYSEAPRSMQGAIMGIFFCLSGVGSLLGSSLVALLSLPGGWLHCPKDFGNINNCRMDLYFFLLAGIQAVTALLFVWIAGRYERASQGPASHSRFSRDRG

SEQ ID NO: 905 - protein, 379 aa, Homo sapiens
MGDSRRRSLGNQPSSEAAGRSEREQDGDPRGLQSSVYESRRVTDPERQDLDNAELGPEDPEEELPPEEVAGEEFPETLDPKEALSELERVLDKDLEEDIPEISRLSISQKLPSTTMTKARKRRRRRRLMELAEPKINWQVLKDRKGRCGKGYAWISPCKMSLHFCLCWPSVYWTERFLEDTTLTITVPAVSRRVEELSRPKRFYLEYYNNNRTTPVWPIPRSSLEYRASSRLKELAAPKIRDNFWSMPMSEVSQVSRAAQMAVPSSRILQLSKPKAPATLLEEWDPVPKPKPHVSDHNRLLHLARPKAQSDKCVPDRDPRWEVLDVTKKVVASPRIISLAKPKVRKGLNEGYDRRPLASMSLPPPKASPEKCDQPRPGL

SEQ ID NO: 906 - protein, 516 aa, Homo sapiens
MASDPIFTLAPPLHCHYGALPPNASGWEQPPNSSGVSVAGAALAASAASRVVTSTDPSCSGFAPPDFNHCLKDWDYNGLPVLTTNAIGQWDLVCDLGWQVILEQILFILGFASGYLFLGYPADRFGRRGIVLLTLGLVGPCGVGGAAAGSSTGIMTLRFLLGFLLAGVDLGVYLMRLELCDPTQRLRVALAGELVGVGGHFLFLGLALVSKDWRFLQRMITAPCILFLFYGWPGLFLESARWLIVKRQIEEAQSVLRILAERNRPHGQMLGEEAQEALQELENTCPLPTTSTFSFASLLNYRNIWKNLLILGFTNFIAHAIRHCYQPVGGGGSPSDFYLCSLLASGTAALACVFLGVTVDRFGRRGILLLSMTLTGIASLVLLGLWDYLNDAAITTFSVLGLFSSQASAILSTLLAAEVIPTTVRGRGLGLIMALGALGGLSCPAQRLHMGHGAFLQHVVLAACALLCILSIMLLPETKRKLLPEVLRDGELCRRPSLLRQPPPNRCDHVPLLATS

SEQ ID NO: 907 - protein, 588 aa, Homo sapiens
MASKKREVQLQTVINNQSLWDEMLQNKGLTVIDVYQAWCGPCRAMQPLFRKLKNELNEDEILHFAVAEADNIVTLQPFRDKCEPVFLFSVNGKIIEKIQGANAPLVNKKVINLIDEERKIAAGEMARPQYPEIPLVDSDSEVSEESPCESVQELYSIAIIKPDAVISKKVLEIKRKITKAGFIIEAEHKTVLTEEQVVNFYSRIADQCDFEEFVSFMTSGLSYILVVSQGSKHNPPSEETEPQTDTEPNERSEDQPEVEAQVTPGMMKNKQDSLQEYLERQHLAQLCDIEEDAANVAKFMDAFFPDFKKMKSMKLEKTLALLRPNLFHERKDDVLRIIKDEDFKILEQRQVVLSEKEAQALCKEYENEDYFNKLIENMTSGPSLALVLLRDNGLQYWKQLLGPRTVEEAIEYFPESLCAQFAMDSLPVNQLYGSDSLETAEREIQHFFPLQSTLGLIKPHATSEQREQILKIVKEAGFDLTQVKKMFLTPEQIEKIYPKVTGKDFYKDLLEMLSVGPSMVMILTKWNAVAEWRRLMGPTDPEEAKLLSPDSIRAQFGISKLKNIVHGASNAYEAKEVVNRLFEDPEEN

SEQ ID NO: 908 - protein, 289 aa, Homo sapiens
MEAVLTEELDEEEQLLRRHRKEKKELQAKIQGMKNAVPKNDKKRRKQLTEDVAKLEKEMEQKHREELEQLKLTTKENKIDSVAVNISNLVLENQPPRISKAQKRREKKAALEKEREERIAEAEIENLTGARHMESEKLAQILAARQLEIKQIPSDGHCMYKAIEDQLKEKDCALTVVALRSQTAEYMQSHVEDFLPFLTNPNTGDMYTPEEFQKYCEDIVNTAAWGGQLELRALSHILQTPIEIIQADSPPIIVGEEYSKKPLILVYMRHAYGLGEHYNSVTRLGKHSY

SEQ ID NO: 909 - protein, 106 aa, Homo sapiens
MSSLSEYAFRMSRLSARLFGEVTRPTNSKSMKVVKLFSELPLAKKKETYDWYPNHHTYAELMQTLRFLGLYRDEHQDFMDEQKRLKKLRGKEKPKKGEGKRAAKRK

SEQ ID NO: 910 - protein, 683 aa, Homo sapiens
MLFIFNFLFSPLPTPALICILTFGAAIFLWLITRPQPVLPLLDLNNQSVGIEGGARKGVSQKNNDLTSCCFSDAKTMYEVFQRGLAVSDNGPCLGYRKPNQPYRWLSYKQVSDRAEYLGSCLLHKGYKSSPDQFVGIFAQNRPEWIISELACYTYSMVAVPLYDTLGPEAIVHIVNKADIAMVICDTPQKALVLIGNVEKGFTPSLKVIILMDPFDDDLKQRGEKSGIEILSLYDAENLGKEHFRKPVPPSPEDLSVICFTSGTTGDPKGAMITHQNIVSNAAAFLKCVEHAYEPTPDDVAISYLPLAHMFERIVQAVVYSCGARVGFFQGDIRLLADDMKTLKPTLFPAVPRLLNRIYDKVQNEAKTPLKKFLLKLAVSSKFKELQKGIIRHDSFWDKLIFAKIQDSLGGRVRVIVTGAAPMSTSVMTFFRAAMGCQVYEAYGQTECTGGCTFTLPGDWTSGHVGVPLACNYVKLEDVADMNYFTVNNEGEVCIKGTNVFKGYLKDPEKTQEALDSDGWLHTGDIGRWLPNGTLKIIDRKKNIFKLAQGEYIAPEKIENIYNRSQPVLQIFVHGESLRSSLVGVVVPDTDVLPSFAAKLGVKGSFEELCQNQVVREAILEDLQKIGKESGLKTFEQVKAIFLHPEPFSIENGLLTPTLKAKRGELSKYFRTQIDSLYEHIQD

SEQ ID NO: 911 - protein, 341 aa, Homo sapiens
MPFPFGKSHKSPADIVKNLKESMAVLEKQDISDKKAEKATEEVSKNLVAMKEILYGTNEKEPQTEAVAQLAQELYNSGLLSTLVADLQLIDFEGKKDVAQIFNNILRRQIGTRTPTVEYICTQQNILFMLLKGYESPEIALNCGIMLRECIRHEPLAKIILWSEQFYDFFRYVEMSTFDIASDAFATFKDLLTRHKLLSAEFLEQHYDRFFSEYEKLLHSENYVTKRQSLKLLGELLLDRHNFTIMTKYISKPENLKLMMNLLRDKSRNIQFEAFHVFKVFVANPNKTQPILDILLKNQAKLIEFLSKFQNDRTEDEQFNDEKTYLVKQIRDLKRPAQQEA

SEQ ID NO: 912 - protein, 1490 aa, Homo sapiens
MPNSERHGGKKDGSGGASGTLQPSSGGGSSNSRERHRLVSKHKRHKSKHSKDMGLVTPEAASLGTVIKPLVEYDDISSDSDTFSDDMAFKLDRRENDERRGSDRSDRLHKHRHHQHRRSRDLLKAKQTEKEKSQEVSSKSGSMKDRISGSSKRSNEETDDYGKAQVAKSSSKESRSSKLHKEKTRKERELKSGHKDRSKSHRKRETPKSYKTVDSPKRRSRSPHRKWSDSSKQDDSPSGASYGQDYDLSPSRSHTSSNYDSYKKSPGSTSRRQSVSPPYKEPSAYQSSTRSPSPYSRRQRSVSPYSRRRSSSYERSGSYSGRSPSPYGRRRSSSPFLSKRSLSRSPLPSRKSMKSRSRSPAYSRHSSSHSKKKRSSSRSRHSSISPVRLPLNSSLGAELSRKKKERAAAAAAAKMDGKESKGSPVFLPRKENSSVEAKDSGLESKKLPRSVKLEKSAPDTELVNVTHLNTEVKNSSDTGKVKLDENSEKHLVKDLKAQGTRDSKPIALKEEIVTPKETETSEKETPPPLPTIASPPPPLPTTTPPPQTPPLPPLPPIPALPQQPPLPPSQPAFSQVPASSTSTLPPSTHSKTSAVSSQANSQPPVQVSVKTQVSVTAAIPHLKTSTLPPLPLPPLLPGGDDMDSPKETLPSKPVKKEKEQRTRHLLTDLPLPPELPGGDLSPPDSPEPKAITPPQQPYKKRPKICCPRYGERRQTESDWGKRCVDKFDIIGIIGEGTYGQVYKARDKDTGELVALKKVRLDNEKEGFPITAIREIKILRQLIHRSVVNMKEIVTDKQDALDFKKDKGAFYLVFEYMDHDLMGLLESGLVHFSEDHIKSFMKQLMEGLEYCHKKNFLHRDIKCSNILLNNSGQIKLADFGLARLYNSEESRPYTNKVITLWYRPPELLLGEERYTPAIDVWSCGCILGELFTKKPIFQANLELAQLELISRLCGSPCPAVWPDVIKLPYFNTMKPKKQYRRRLREEFSFIPSAALDLLDHMLTLDPSKRCTAEQTLQSDFLKDVELSKMAPPDLPHWQDCHELWSKKRRRQRQSGVVVEEPPPSKTSRKETTSGTSTEPVKNSSPAPPQPAPGKVESGAGDAIGLADITQQLNQSELAVLLNLLQSQTDLSIPQMAQLLNIHSNPEMQQQLEALNQSISALTEATSQQQDSETMAPEESLKEAPSAPVILPSAEQMTLEASSTPADMQNILAVLLSQLMKTQEPAGSLEENNSDKNSGPQGPRRTPTMPQEEAAACPPHILPPEKRPPEPPGPPPPPPPPPLVEGDLSSAPQELNPAVTAALLQLLSQPEAEPPGHLPHEHQALRPMEYSTRPRPNRTYGNTDGPETGFSAIDTDERNSGPALTESLVQTLVKNRTFSGSLSHLGESSSYQGTGSVQFPGDQDLRFARVPLALHPVVGQPFLKAEGSSNSVVHAETKLQNYGELGPGTTGASSSGAGLHWGGPTQSSAYGKLYRGPTRVPPRGGRGRGVPY

SEQ ID NO: 913 - protein, 615 aa, Homo sapiens
MFARGSRRRRSGRAPPEAEDPDRGQPCNSCREQCPGFLLHGWRKICQHCKCPREEHAVHAVPVDLERIMCRLISDFQRHSISDDDSGCASEEYAWVPPGLKPEQVYQFFSCLPEDKVPYVNSPGEKYRIKQLLHQLPPHDSEAQYCTALEEEEKKELRAFSQQRKRENLGRGIVRIFPVTITGAICEECGKQIGGGDIAVFASRAGLGACWHPQCFVCTTCQELLVDLIYFYHVGKVYCGRHHAECLRPRCQACDEIIFSPECTEAEGRHWHMDHFCCFECEASLGGQRYVMRQSRPHCCACYEARHAEYCDGCGEHIGLDQGQMAYEGQHWHASDRCFCCSRCGRALLGRPFLPRRGLIFCSRACSLGSEPTAPGPSRRSWSAGPVTAPLAASTASFSAVKGASETTTKGTSTELAPATGPEEPSRFLRGAPHRHSMPELGLRSVPEPPPESPGQPNLRPDDSAFGRQSTPRVSFRDPLVSEGGPRRTLSAPPAQRRRPRSPPPRAPSRRRHHHHNHHHHHNRHPSRRRHYQCDAGSGSDSESCSSSPSSSSSESSEDDGFFLGERIPLPPHLCRPMPAQDTAMETFNSPSLSLPRDSRAGMPRQARDKNCIVA

SEQ ID NO: 914 - protein, 100 aa, Homo sapiens
MVGWQEGANHKNGAGRSQKQEMAEKMVPEVASGEEIGGRSEAGRESPDLFRPNTVEARDRPAGPPFSKSASVRVLQRSRTNRDYIPIEHIQSPIGIYNML

SEQ ID NO: 915 - protein, 210 aa, Homo sapiens [sequence omitted]

SEQ ID NO: 916 - protein, 84 aa, Homo sapiens
MQKSSSTRAGDMREKDTRGCRMSSRSECGNLTSHRILSSGGSWTLQLLLYSSLPHSENQQRSELPQMTDGKYPAWSWITKLYKL

SEQ ID NO: 917 - protein, 97 aa, Homo sapiens
MGKKQSRKAENYKNQSASPPPKDRSSSPATEQSWTQNDFDELREEGFRESDFSELKEEVRTHRKEAKNLEKRLDKWLTRVTSVEKSLNDLMELKTMA

SEQ ID NO: 918 - protein, 133 aa, Homo sapiens
MQPTLSAVSSCTAPPRPRSRRSTRPPSSRLNRSRSRSTSGSIGGMAGVGVGAGAGQGRAGAEGGGGGAPLRRILSCRLLATKWVRSPWRLTVPSSSRGLEMVARRPPPAPDSALPEDPAPPHASLSPSRLRLS

SEQ ID NO: 919 - protein, 1644 aa, Homo sapiens
DLSGSIDDLPMGTEGALSPGVSTSGISSSQGEQSNPAQSPFSPHTSPHLPGIRGPSPSPVGSPASVAQSRSGPLSPAAVPGNQMPPRPPSGQSDSIMHPSMNQSSIAQDRGYMQRNPQMPQYSSPQPGSALSPRQPSGGQIHTGMGSYQQNSMGSYGPQGGQYGPQGGYPRQPNYNALPNANYPSAGMAGGINPMGAGGQMHGQPGIPPYGTLPPGRMSHASMGNRPYGPNMANMPPQVGSGMCPPPGGMNRKTQETAVAMHVAANSIQNRPPGYPNMNQGGMMGTGPPYGQGINSMAGMINPQGPPYSMGGTMANNSAGMAASPEMMGLGDVKLTPATKMNNKADGTPKTESKSKKSSSSTTTNEKITKLYELGGEPERKMWVDRYLAFTEEKAMGMTNLPAVGRKPLDLYRLYVSVKEIGGLTQVNKNKKWRELATNLNVGTSSSAASSLKKQYIQCLYAFECKIERGEDPPPDIFAAADSKKSQPKIQPPSPAGSGSMQGPQTPQSTSSSMAEGGDLKPPTPASTPHSQIPPLPGMRSNSVGIQDAFNDGSDSTFQKRNSMTPNPGYQPSMNTSDMMGRMSYEPNKDPYGSMRKAPGSDPFMSSGQGPNGGMGDPYSRAAGPGLGNVAMGPRQHYPYGGPYDRVRTEPGIGPEGNMSTGAPQPNLMPSNPDSGMYSPSRYPPQQQQQQQQRHDSYGNQFSTQGTPSGSPFPSQQTTMYQQQQQNYKRPMDGTYGPPAKRHEGEMYSVPYSTGQGQPQQQQLPPAQPQPASQQQAAQPSPQQDVYNQYGNAYPATATAATERRPAGGPQNQFPFQFGRDRVSAPPGTNAQQNMPPQMMGGPIQASAEVAQQGTMWQGRNDMTYNYANRQSTGSAPQGPAYHGVNRTDEMLHTDQRANHEGSWPSHGTRQPPYGPSAPVPPMTRPPPSNYQPPPSMQNHIPQVSSPAPLPRPMENRTSPSKSPFLHSGMKMQKAGPPVPASHIAPAPVQPPMIRRDITFPPGSVEATQPVLKQRRRLTMKDIGTPEAWRVMMSLKSGLLAESTWALDTINILLYDDNSIMTFNLSQLPGLLELLVEYFRRCLIEIFGILKEYEVGDPGQRTLLDPGRFSKVSSPAPMEGGEEEEELLGPKLEEEEEEEVVENDEEIAFSGKDKPASENSEEKLISKFDKLPVKIVQKNDPFVVDCSDKLGRVQEFDSGLLHWRIGGGDTTEHIQTHFESKTELLPSRPHAPCPPAPRKHVTTAEGTPGTTDQEGPPPDGPPEKRITATMDDMLSTRSSTLTEDGAKSSEAIKESSKFPFGISPAQSHRNIKILEDEPHSKDETPLCTLLDWQDSLAKRCVCVSNTIRSLSFVPGNDFEMSKHPGLLLILGKLILLHHKHPERKQAPLTYEKEEEQDQGVSCNKVEWWWDCLEMLRENTLVTLANISGQLDLSPYPESICLPVLDGLLHWAVCPSAEAQDPFSTLGPNAVLSPQRLVLETLSKLSIQDNNVDLILATPPFSRLEKLYSTMVRFLSDRKNPVCREMAVVLLANLAQGDSLAARAIAVQKGSIGNLLGFLEDSLAATQFQQSQASLLHMQNPPFEPTSVDMMRRAARALLALAKVDENHSEFTLYESRLLDISVSPLMNSLVSQVICDVLFLIGQS

SEQ ID NO: 920 - protein, 223 aa, Homo sapiens
MASKLLRAVILGPPGSGKGTVCQRIAQNFGLQHLSSGHFLRENIKASTEVGEMAKQYIEKSLLVPDHVITRLMMSELENRRGQHWLLDGFPRTLGQAEALDKICEVDLVISLNIPFETLKDRLSRRWIHPPSGRVYNLDFNPPHVHGIDDVTGEPLVQQEDDKPEAVAARLRQYKDVAKPVIELYKSRGVLHQFSGTETNKIWPYVYTLFSNKITPIQSKEAY

SEQ ID NO: 921 - protein, 610 aa, Homo sapiens
ARAPASLTAGDTLSVPAPAVQPEESLKTDYPEIGEGKPTPALSEEASSSSIRERPPEEVAARLAQQEKQEQVKIESLAKSLEDALRQTASVTLQAIAAQNAAVQAVNAHSNILKAAMDNSEIAGEKKSAQWRTVEGALKERRKAVDEAADALLKAKEELEKMKSVIENTKKKEVAGAKPHISAAEGKLHNMIVDLDNVVKKVQAAQSEAKVVSQYHELVVQARDDFKRELDSITPEVLPGWKGMTDKLSTDDLNSLIAHAHRRIDQLNRELAEQKATEKQHITLALEKQKLEEKRAFDSAVAKALEHHRSEIQAEQDRKIEEVRDAMENEMRTQLRRQAAAHTDHLRDVLRVQEQELKSEFEQNLSEKLSEQELQFRRLSQEQVDNFTLDINTAYARLRGIEQAVQSHAVAEEEARKAHQLWLSVEALKYSMKTSSAETPTIPLGSAVEAIKANCSDNEFTQALTAAIPPESLTRGVYSEETLRARFYAVQKLARRVAMIDETRNSLYQYFLSYLQSLLLFPPQQLKPPPELCPEDINTFKLLSYASYCIEHGDLELAAKFVNQLKGESRRVAQDWLKEARMTLETKQIVEILTAYASAVGIGTTQVQPE

SEQ ID NO: 922 - protein, 527 aa, Homo sapiens
MESQGVPPGPYRATKLWNEVTTSFRAGMPLRKHRQHFKKYGNCFTAGEAVDWLYDLLRNNSNFGPEVTRQQTIQLLRKFLKNHVIEDIKGRWGSENVDDNNQLFRFPATSPLKTLPRRYPELRKNNIENFSKDKDSIFKLRNLSRRTPKRHGLHLSQENGEKIKHEIINEDQENAIDNRELSQEDVEEVWRYVILIYLQTILGVPSLEEVINPKQVIPQYIMYNMANTSKRGVVILQNKSDDLPHWVLSAMKCLANWPRSNDMNNPTYVGFERDVFRTIADYFLDLPEPLLTFEYYELFVNILGLLQPHLERVAIDALQLCCLLLPPPNRRKLQLLMRMISRMSQNVDMPKLHDAMGTRSLMIHTFSRCVLCCAEEVDLDELLAGRLVSFLMDHHQEILQVPSYLQTAVEKHLDYLKKGHIENPGDGLFAPLPTYSYCKQISAQEFDEQKVSTSQAAIAELLENIIKNRSLPLKEKRKKLKQFQKEYPLIYQKRFPTTESEAALFGDKPTIKQPMLILRKPKFRSLR

SEQ ID NO: 923 - protein, 197 aa, Homo sapiens
MTARGTPSRFLASVLHNGLGRYVQQLQRLSFSVSRDGASSRGAREFVEREVIDFARRNPGVVIYVNSRPCCVPRVVAEYREWGRARAGGRDQGLDPLSSFSLGRTGQLPPTLTPLLPVNGAVREESIHCKSVEEISTLVQKLADQSGLDVIRIRKPFHTDNPSIQGQWHPFTNKPTTFRGLRPREVQDPAPAQVQAQ

SEQ ID NO: 924 - protein, 502 aa, Homo sapiens
MASKKLGADFHGTFSYLDDVPFKTGDKFKTPAKVGLPIGFSLPDCLQVVREVQYDFSLEKKTIEWAEEIKKIEEAEREAECKIAEAEAKVNSKSGPEGDSKMSFSKTHSTATMPPPINPILASLQHNSILTPTRVSSSATKQKVLSPPHIKADFNLADFECEEDPFDNLELKTIDEKEELRNILVGTTGPIMAQLLDNNLPRGGSGSVLQDEEVLASLERATLDFKPLHKPNGFITLPQLGNCEKMSLSSKVSLPPIPAVSNIKSLSFPKLDSDDSNQKTAKLASTFHSTSCLRNGTFQNSLKPSTQSSASELNGHHTLGLSALNLDSGTEMPALTSSQMPSLSVLSVCTEESSPPNTGPTVTPPNFSVSQVPNMPSCPQAYSELQMLSPSERQCVETVVNMGYSYECVLRAMKKKGENIEQILDYLFAHGQLCEKGFDPLLVEEALEMHQCSEEKMMEFLQLMSKFKEMGFELKDIKEVLLLHNNDQDNALEDLMARAGAS

SEQ ID NO: 925 - protein, 213 aa, Homo sapiens
MAVLSAPGLRGFRILGLRSSVGLAVQARGVHQSVATDGPSSTQPALPKARAVAPKPSSRGEYVVAKLDDLVNWARRSSLWPMTFGLACCAVEMMHMAAPRYDMDRFGVVFRASPRQSDVMIVAGTLTNKMAPALRKVYDQMPEPRYVVSMGSCANGGGYYHYSYSVVRGCDRIVPVDIYIPGCPPTAEALLYGILQLQRKIKRERRLQIWYRR

SEQ ID NO: 926 - protein, 580 aa, Homo sapiens
MATTGAAATTEIGNPEYKQPRSIFDLTADFFDSCRLSNPSETQSAFGPPKTFDPEEAEEDKSSKDGVILDRWTCNTCKIEFLSLQDQRYHFKSDIHRLNIKLSVAGKAILKEEDVDELTSESVQDYDVSSISGSEDEAETRPPSFHFDAQKGIDKKKLFFRLQSGDKVSIWKCLIMDDAESVSFENDRGVSVDCCGSLVENEVTERLRNLIRENKDDRQMRVVLLASGGHFAGTVFNGKSVVAHKTFHRYVVRAKAGKKQSTKDASGRSIHSAGASLRRYNELALKKDIQELLASWKPYFDGAACVFVHAPSSSRQLLFNGGKPYFSSQNCAVRNVPFTIRRPTFKESQRIYNQLTQIAHVTEEIFVNRPEVTKANTVVQTHNEDSGKTSRKEEPDETSSSNIILEEPNRIEEDIEDGVTGTSTALHEAAKSGDCERVMEFLEEGMDPCAKDERGRTPYMLANEKEVRNTFRRFMALNLEKWNWHDAKVPSPLTKEMEESQAAKQAEKDAKQKARTKELKKLRKAREKKAQAEAAQAEKEKPISKVEEVRRAMAAQREKRAAAAERRMASLNIQSSSSTS

SEQ ID NO: 927 - protein, 374 aa, Homo sapiens
VTSFPVVQLHMNRTAMRASQKDFENSMNQVKLLKKDPGNEVKLKLYALYKQATEGPCNMPKPGVFDLINKAKWDAWNALGSLPKEAARQNYVDLVSSLSPSLESSSQVEPGTDRKSTGFETLVVTSEDGITKIMFNRPKKKNAINTEMYHEIMRALKAASKDDSIITVLTGNGDYYSSGNDLTNFTDIPPGGVEEKAKNNAVLLREFVGCFIDFPKPLIAVVNGPAVGISVTLLGLFDAVYASDRATFHTPFSHLGQSPEGCSSYTFPKIMSPAKATEMLIFGKKLTAGEACAQGLVTEVFPDSTFQKEVWTRLKAFAKLPPNALRISKEVIRKREREKLHAVNAEECNVLQGRWLSDECTNAVVNFLSRKSKL

SEQ ID NO: 928 - protein, 969 aa, Homo sapiens [sequence omitted]

SEQ ID NO: 929 - protein, 435 aa, Homo sapiens
MEEDWGKTVSEKVISAYMSLPKKGKPQGREVTVLSAFLVSSPSQDPKVIALGTGTKCVSGSLLSPRGDIVNDSHAEVVARRALIRFFYSEIQRMQLTSGKSNEAKRQRIDSETSSILESADSSCPGEVKYKLKSGCLLHLYISQLPCGYASTSSPLYALKKIPSTQVDDSLLVQASDICSSRHSDVPEIGSNSNKGNGSQVADMVQRKPGRGETTLSVSCSDKIARWNVLGVQGALLYQVLQPVYISTITVGQSLHSPDNFSLADHLRRSLYERILPLSDELLTSFRLNKPLFFVAPVPPSEFQHSETAQATLTCGLVFNTLPHMTCVSFLCFLKGGVIYLLALRYSLCWNYSGLHEVILGTTGRKQGTSAKGALYPSTQSSICKQRLLELFLKETHGHKRESSKSKKSYRELKVCAMLILFCSFNMLPLEQLTC

SEQ ID NO: 930 - protein, 19 aa, Homo sapiens
CASSPIPGRRNTGELFFGE

SEQ ID NO: 931 - protein, 2969 aa, Homo sapiens
MDPRNTAMLGLGSDSEGFSRKSPSAISTGTLVSKREVELEKNTKEEEDLRKRNRERNIEAGKDDGLTDAQQQFSVKETNFSEGNLKLKIGLQAKRTKKPPKNLENYVCRPAIKTTIKHPRKALKSGKMTDEKNEHCPSKRDPSKLYKKADDVAAIECQSEEVIRLHSQGENNPLSKKLSPVHSEMADYINATPSTLLGSRDPDLKDRALLNGGTSVTEKLAQLIATCPPSKSSKTKPKKLGTGTTAGLVSKDLIRKAGVGSVAGIIHKDLIKKPTISTAVGLVTKDPGKKPVFNAAVGLVNKDSVKKLGTGTTAVFINKNLGKKPGTITTVGLLSKDSGKKLGIGIVPGLVHKESGKKLGLGTVVGLVNKDLGKKLGSTVGLVAKDCAKKIVASSAMGLVNKDIGKKLMSCPLAGLISKDAINLKAEALLPTQEPLKASCSTNINNQESQELSESLKDSATSKTFEKNVVRQNKESILEKFSVRKEIINLEKEMFNEGTCIQQDSFSSSEKGSYETSKHEKQPPVYCTSPDFKMGGASDVSTAKSPFSAVGESNLPSPSPTVSVNPLTRSPPETSSQLAPNPLLLSSTTELIEEISESVGKNQFTSESTHLNVGHRSVGHSISIECKGIDKEVNDSKTTHIDIPRISSSLGKKPSLTSESSIHTITPSVVNFTSLFSNKPFLKLGAVSASDKHCQVAESLSTSLQSKPLKKRKGRKPRWTKVVARSTCRSPKGLELERSELFKNVSCSSLSNSNSEPAKFMKNIGPPSFVDHDFLKRRLPKLSKSTAPSLALLADSEKPSHKSFATHKLSSSMCVSSDLLSDIYKPKRGRPKSKEMPQLEGPPKRTLKIPASKVFSLQSKEEQEPPILQPEIEIPSFKQGLSVSPFPKKRGRPKRQMRSPVKMKPPVLSVAPFVATESPSKLESESDNHRSSSDFFESEDQLQDPDDLDDSHRPSVCSMSDLEMEPDKKITKRNNGQLMKTIIRKINKMKTLKRKKLLNQILSSSVESSNKGKVQSKLHNTVSSLAATFGSKLGQQINVSKKGTIYIGKRRGRKPKTVLNGILSGSPTSLAVLEQTAQQAAGSALGQILPPLLPSSASSSEILPSPICSQSSGTSGGQSPVSSDAGFVEPSSVPYLHLHSRQGSMIQTLAMKKASKGRRRLSPPTLLPNSPSHLSELTSLKEATPSPISESHSDETIPSDSGIGTDNNSTSDRAEKFCGQKKRRHSFEHVSLIPPETSTVLSSLKEKHKHKCKRRNHDYLSYDKMKRQKRKRKKKYPQLRNRQDPDFIAELEELISRLSEIRITHRSHHFIPRDLLPTIFRINFNSFYTHPSFPLDPLHYIRKPDLKKKRGRPPKMREAMAEMPFMHSLSFPLSSTGFYPSYGMPYSPSPLTAAPIGLGYYGRYPPTLYPPPPSPSFTTPLPPPSYMHAGHLLLNPAKYHKKKHKLLRQEAFLTTSRTPLLSMSTYPSVPPEMAYGWMVEHKHRHRHKHREHRSSEQPQVSMDTGSSRSVLESLKRYRFGKDAVGERYKHKEKHRCHMSCPHLSPSKSLINREEQWVHREPSESSPLALGLQTPLQIDCSESSPSLSLGGFTPNSEPASSDEHTNLFTSAIGSCRVSNPNSSGRKKLTDSPGLFSAQDTSLNRLHRKESLPSNERAVQTLAGSQPTSDKPSQRPSESTNCSPTRKRSSSESTSSTVNGVPSRSPRLVASGDDSVDSLLQRMVQNEDQEPMEKSIDAVIATASAPPSSSPGRSHSKDRTLGKPDSLLVPAVASDSCNNSISLLSEKLTSSCSPHHIKRSVVEAMQRQARKMCNYDKILATKKNLDHVNKILKAKKLQRQARTGNNFVKRRPGRPRKCPLQAVVSMQAFQAAQFVNPELNRDEEGAALHLSPDTVTDVIEAVVQSVNLNPEHKKGLKRKGWLLEEQTRKKQKPLPEEEEQENNKSFNEAPVEIPSPSETPAKPSEPESTLQPVLSLIPREKKPPRPPKKKYQKAGLYSDVYKTTDPKSRLIQLKKEKLEYTPGEHEYGLFPAPIHVVFFVSGKYLRQKRIDFQLPYDILWQWKHNQLYKKPDVPLYKKIRSNVYVDVKPLSGYEATTCNCKKPDDDTRKGCVDDCLNRMIFAECSPNTCPCGEQCCNQRIQRHEWVQCLERFRAEEKGWGIRTKEPLKAGQFIIEYLGEVVSEQEFRNRMIEQYHNHSDHYCLNLDSGMVIDSYRMGNEARFINHSCDPNCEMQKWSVNGVYRIGLYALKDMPAGTELTYDYNFHSFNVEKQQLCKCGFEKCRGIIGGKSQRVNGLTSSKNSQPMATHKKSGRSKEKRKSKHKLKKRRGHLSEEPSENINTPTRLTPQLQMKPMSNRERNFVLKHHVFLVRNWEKIRQKQEEVKHTSDNIHSASLYTRWNGICRDDGNIKSDVFMTQFSALQTARSVRTRRLAAAEENIEVARAARLAQIFKEICDGIISYKDSSRQALAAPLLNLPPKKKNADYYEKISDPLDLITIEKQILTGYYKTVEAFDADMLKVFRNAEKYYGRKSPVGRDVCRLRKAYYNARHEASAQIDEIVGETASEADSSETSVSEKENGHEKDDDVIRCICGLYNDEGLMIQCDKCMVWQHCDCMGVNSDVEHYLCEQCDPRPVDREVPMIPRPHYAQPGCVYFICLLRDDLLLRQGDCVYLMRDSRRTPDGHPVRQSYRLLSHINRHKLDIFRIEKLWKNEKEERFAFGHHYFRPHETHHSPSRRFYHNELFRVPLYEIIPLEAVVGTCCVLDLYTYCKGRPKGVKEQDVYICDYRLDKSAHLFYKIHRNRYPVCTKPYAFDHFPKKLTPKKDFSPHYVPDNYKRNGGRSSWKSERSKPPLKDLGQEDDALPLIEEVLASQEQAANEIPSLEEPEREGATANVSEGEKKTEESSQEPQSTCTPEERRHNQRERLNQILLNLLEKIPGKNAIDVTYLLEEGSGRKLRRRTLFIPENSFRK

SEQ ID NO: 932 - protein, 2969 aa, Homo sapiens; identical to SEQ ID NO: 931

SEQ ID NO: 933 - protein, 122 aa, Homo sapiens
MQVWFYICKSINVIHHTNRNKDKNHLIISIDAGKSFDKTQHRFMLKMLNKLSIEATYLKIIRAICEKSRADIILNGQKLEAYPLKTSRWQGCPLSTLLFSIVVEVLDRAIRQEKEIKGIQIG

SEQ ID NO: 934 - protein, 389 aa, Homo sapiens
MPRPVKVAAVGGQSYLSSILRFFVKSLANMTSDWLGYMRFLIIPLGSHPVAKYLGSVDSKYSSSFLDSGWRDLFSRSEPPVSEQLDVAGRVMQYVNGAATTHQLPVAEAMLTCRHKFPDEDSYQKFIPFIGVVKVGLVEDSPSTAGDGDDSPVVSLTVPSTSPPSSSGLSRDATATPPSSPSMSSALAIVGSPNSPYGDVIGLQVDYWLGHPGERRREGDKRDASSKNTLKSVFRSVQVSRLPHSGEAQLSGTMAMTVVTKEKNKKVPTIFLSKKPREKEVDSKSQVIEGISRLICSSPSLGPSLGPDPSSQPGFPPAGSFPPCHLPLTNPGSEPLIPDRPCSQEWLRTQGPSPALCTPQPGHLRPTAPLELFSCPLTPSQKFLHRTSF

SEQ ID NO: 935 - protein, 279 aa, Homo sapiens
MDLMNGQASSVNIAATASEKSSSSESLSDKGSELKKSFDAVVFDVLKVTPEEYAGQITLMDVPVFKAIQPDELSSCGWNKKEKYSSAPNAVAFTRRFNHVSFWVVREILHAQTLKIRAEVLSHYIKTAKKLYELNNLHALMAVVSGLQSAPIFRLTKTWALLSRKDKTTFEKLEYVMSKEDNYKRLRDYISSLKMTPCIPYLGIYLSDLTYIDSAYPSTGSILENEQRSNLMNNILRIISDLQQSCEYDIPMLPHVQKYLNSVQYIEELQKFVEDDNYK

SEQ ID NO: 936 - protein, 148 aa, Homo sapiens
MACKTAFNKTGFQEVFDPPHYELFSLRDKEISADLADLSEELDNYQKMRRSSTASRCIHDHHCGSQASSVKQSRTNLSSMELPFRNDFAQPQPMKTFNSTFKKSSYTFKQGHECPEQALEDRVMEEIPCEIYVRGREDSAQASISIDF

SEQ ID NO: 937 - protein, 138 aa, Homo sapiens
MATRRLGVGETLGALNAALGPGGPVWTKETRTRHLRSRDFLAPHRALQARFDDGQVPEHLLHALACLQGPGVAPVLRCAPTPAGLSLQLQRSAVFERVLSAVAAYATPASPASLGQRVLLHCPALRSSPCALTGCACA

SEQ ID NO: 938 - protein, 196 aa, Homo sapiens
MAALKALVSGCGRLLRGLLAGPAATSWSRLPARGFREVVETQEGKTTIIEGRITATPKESPNPPNPSGQCPICRWNLKHKYNYDDVLLLSQFIRPHGGMLPRKITGLCQEEHRKIEECVKMAHRAGLLPNHRPRLPEGVVPKSKPQLNRYLTRWAPGSVKPIYKKGPRWNRVRMPVGSPLLRDNVCYSRTPWKLYH

SEQ ID NO: 939 - protein, 557 aa, Homo sapiens
MDQSRVLLWVKAEPFIVGALQVPPPSKFSLHYLRKISTYVQIRATEGAYPRLYWSTWRHIACGKLQLAKDLAWLYFEIFDSLSMKTPEERLEWSEVLSNCMSEEEVEKQRNQLSVDTLQFLLFLYIQQLNKVSLRTSLIGEEWPSPRNKSQSPDLTEKSNCHNKNWNDYSHQAFVYDHLSDLLELLLDPKQLTASFHSTHSSLVSREAVVALSFLIEGTISRARKIYPLHELALWQPLHADSGFSKISKTFSFYKLETWLRSCLTGNPFGTSACLKSGKKLAWAHQVEGTTKRAKIACNTHVAPRMHRLVVMSQVYKQTLAKSSDTLAGAHVKIHRCNESFIYLLSPLRSVTIEKCRNSIFVLGPVGTTLHLHSCDNVKVIAVCHRLSISSTTGCIFHVLTPTRPLILSGNQTVTFAPFHTHYPMLEDHMARTGLATVPNYWDNPMVVCRENSDTRVFQLLPPCEFYVFIIPFEMEGDTTEIPGGLPSVYQKALGQREQKIQIWQKTVKEAHLTKDQRKQFQVLVENKFYEWLINTGHRQQLDSLVPPAAGSKQAAG

SEQ ID NO: 940 - protein, 410 aa, Homo sapiens
MGANASNYPHSCSPRVGGNSQAQQTFIGTSSYSQQGYGCESKLYSLDHGHEKPQDKKKRTSGLATLKKKFIKRRKSNRSADHAKQMRELLSGWDVRDVNALVEEYEGTSALKELSLQASLARPEARTLQKDMADLYEYKYCTDVDLIFQETCFPVHRAILAARCPFFKTLLSSSPEYGAEIIMDINTAGIDMPMFSALLHYLYTGEFGMEDSRFQNVDILVQLSEEFGTPNSLDVDMRGLFDYMCYYDVVLSFSSDSELVEAFGGNQNCLDEELKAHKAVISARSPFFRNLLQRRIRTGEEITDRTLRTPTRIILDESIIPKKYATVILHCMYTDVVDLSVLHCSPSVGSLSEVQALVAGKPNMTRAEEAMELYHIALFLEFNMLAQEETTVIRPACAAELSNSCLLPQS

SEQ ID NO: 941 - protein, 559 aa, Homo sapiens
MATALSEEELDNEDYYSLLNVRREASSEELKAAYRRLCMLYHPDKHRDPELKSQAERLFNLVHQAYEVLSDPQTRAIYDIYGKRGLEMEGWEVVERRRTPAEIREEFERLQREREERRLQQRTNPKGTISVGVDATDLFDRYDEEYEDVSGSSFPQIEINKMHISQSIEAPLTATDTAILSGSLSTQNGNGGGSINFALRRVTSAKGWGELEFGAGDLQGPLFGLKLFRNLTPRCFVTTNCALQFSSRGIRPGLTTVLARNLDKNTMGYLQWRWGIQSAMNTSIVRDTKTSHFTVALQLGIPHSFALIIYQHKFQDDDQTRVKGSLKAGFFGTVVEYGAERKISRHSVLGAAVSVGVPQGVSLKVKLNRASQTYFFPIHLTDQLLPSAMFYATVGPLVVYFAMHRLIIKPYLRAQKEKELEKQRESAATDVLQKKQEAESAVRLMQESVRRIIEAEESRMGLIIVNAWYGKFVNDKSRKSEKVKVIDVTVPLQCLVKDSKLILTEASKAGLPGFYDPCVGEEKNLKVLYQFRGVLHQVMVLDSEALRIPKQSHRIDTDG

SEQ ID NO: 942 - protein, 773 aa, Homo sapiens
MAECGASGSGSSGDSLDKSITLPPDEIFRNLENAKRFAIDIGGSLTKLAYYSTVQHKVAKVRSFDHSGKDTEREHEPPYEISVQEEITARLHFIKFENTYIEACLDFIKDHLVNTETKVIQATGGGAYKFKDLIEEKLRLKVDKEDVMTCLIKGCNFVLKNIPHEAFVYQKDSDPEFRFQTNHPHIFPYLLVNIGSGVSIVKVETEDRFEWVGGSSIGGGTFWGLGALLTKTKKFDELLHLASRGQHSNVDMLVRDVYGGAHQTLGLSGNLIASSFGKSATADQEFSKEDMAKSLLHMISNDIGQLACLHARLHSLDRVYFGGFFIRGHPVTMRTITYSINFFSKGEVQALFLRHEGYLGAIGAFLKGAEQDNPNQYSWGENYAGSSGLMSASPELGPAQRARSGTFDLLEMDRLERPLVDLPLLLDPPSYVPDTVDLTDDALARKYWLTCFEEALDGVVKRAVASQPDSVDAAERAEKFRQKYWNKLQTLRQQPFAYGTLTVRSLLDTREHCLNEFNFPDPYSKVKQRENGVALRCFPGVVRSLDALGWEERQLALVKGLLAGNVFDWGAKAVSAVLESDPYFGFEEAKRKLQERPWLVDSYSEWLQRLKGPPHKCALIFADNSGIDIILGVFPFVRELLLRGTEVILACNSGPALNDVTHSESLIVAERIAGMDPVVHSALQEERLLLVQTGSSSPCLDLSRLDKGLAALVRERGADLVVIEGMGRAVHTNYHAALRCESLKLAVIKNAWLAERLGGRLFSVIFKYEVPAE

SEQ ID NO: 943 - protein, 422 aa, Homo sapiens
MTVFFKTLRNHWKKTTAGLCLLTWGGHWLYGKHCDNLLRRAACQEAQVFGNQLIPPNAQVKKATVFLNPAACKGKARTLFEKNAAPILHLSGMDVTIVKTDYEGQAKKLLELMENTDVIIVAGGDGTLQEVVTGVLRRTDEATFSKIPIGFIPLGETSSLSHTLFAESGNKVQHITDATLAIVKGETVPLDVLQIKGEKEQPVFAMTGLRWGSFRDAGVKVSKYWYLGPLKIKAAHFFSTLKEWPQTHQASISYTGPTERPPNEPEETPVQRPSLYRRILRRLASYWAQPQDALSQEVSPEVWKDVQLSTIELSITTRNNQLDPTSKEDFLNICIEPDTISKGDFITIGSRKVRNPKLHVEGTECLQASQCTLLIPEGAGGSFSIDSEEYEAMPVEVKLLPRKLQFFCDPRKREQMLTSPTQ

SEQ ID NO: 944 - protein, 956 aa, Homo sapiens
MAAAVGVRGRYELPPCSGPGWLLSLSALLSVAARGAFATTHWVVTEDGKIQQQVDSPMNLKHPHDLVILMRQEATVNYLKELEKQLVAQKIHIEENEDRDTGLEQRHNKEDPDCIKAKVPLGDLDLYDGTYITLESKDISPEDYIDTESPVPPDPEQPDCTKILELPCSIHAFQHLRGVQERVNLSAPLLPKEDPIFTYLSKRLGRSIDDIGHLIHEGLQKNTSSWVLYNMASFYWRIKNEPYQVVECAMRALHFSSRHNKDIALVNLANVLHRAHFSADAAVVVHAALDDSDFFTSYYTLGNIYAMLGEYNHSVLCYDHALQARPGFEQAIKRKHAVLCQQKLEQKLEAQHRSLQRTLNELKEYQKQHDHYLRQQEILEKHKLIQEEQILRNIIHETQMAKEAQLGNHQICRLVNQQHSLHCRWDQPVRYHRGDIFENVDYVQFGEDSSTSSMMSVNFDVQSNQSDINDSVKSSPVAHSILWIWGRDSDAYRDKQHILWPKRADCTESYPRVPVGGELPTYFLPPENKGLRIHELSSDDYSTEEEAQTPDCSITDFRKSHTLSYLVKELEVRMDLKAKMPDDHARKILLSRINNYTIPEEEIGSFLFHAINKPNAPIWLILNEAGLYWRAVGNSTFAIACLQRALNLAPLQYQDVPLVNLANLLIHYGLHLDATKLLLQALAINSSEPLTFLSLGNAYLALKNISGALEAFRQALKLTTKCPECENSLKLIRCMQFYPFLYNITSSVCSGNCHEKTLDNSRDKQKYFDNSQSLDAAEEEPSERGTEEDPVFSVENSGRDSDALRLESTVVEESNGSDEMENSDETKMSEEILALVDEFQQAWPLEGFGGALEMKGRRLDLQGIRVLKKGPQDGVARSSCYGDCRSEDDEATEWITFQVKRVKKPKGDHKKTPGKKVETGQIENGHRYQANLEITGPKVASPGPQGLLDWKTRKVP

SEQ ID NO: 945 - protein, 261 aa, Homo sapiens
MLRVLCLLRPWRPLRARGCASDGAAGGSEIQVRALAGPDQGITEILMNRPSARNALGNVFVSELLETLAQLREDRQVRVLLFRSGVKGAFCAGADLKEREQMSEAEVGVFVQRLRGLMNDIASSAVMGLIETTRGLLPGAGGTQRLPRCLGVALAKELIFTGRRLSGTEAHVLGLVNHAVAQNEEGDAAYQRARALAQEILPQAPIAVRLGKVAINRGTEVDIASGMAIEGMCYAQNIPTRDRLEGMAAFREKRTPKFVGK

SEQ ID NO: 946 - protein, 612 aa, Homo sapiens
MAAPEGSGLGEDARLDQETAQWLRWDKNSLTLEAVKRLIAEGNKEELRKCFGARMEFGTAGLRAAMGPGISRMNDLTIIQTTQGFCRYLEKQFSDLKQKGIVISFDARAHPSSGGSSRRFARLAATTFISQGIPVYLFSDITPTPFVPFTVSHLKLCAGIMVTASHNPKQDNGYKVYWDNGAQIISPHDKGISQAIEENLEPWPQAWDDSLIDSSPLLHNPSASINNDYFEDLKKYCFHRSVNRETKVKFVHTSVHGVGHSFVQSAFKAFDLVPPEAVPEQKDPDPEFPTVKYPNPEEGKGVLTLSFALADKTKARIVLANDPDADRLAVAEKQDSGEWRVFSGNELGALLGWWLFTSWKEKNQDRSALKDTYMLSSTVSSKILRAIALKEGFHFEETLTGFKWMGNRAKQLIDQGKTVLFAFEEAIGYMCCPFVLDKDGVSAAVISAELASFLATKNLSLSQQLKAIYVEYGYHITKASYFICHDQETIKKLFENLRNYDGKNNYPKACGKFEISAIRDLTTGYDDSQPDKKAVLPTSKSSQMITFTFANGGVATMRTSGTEPKIKYYAELCAPPGNSDPEQLKKELNELVSAIEEHFFQPQKYNLQPKAD

SEQ ID NO: 947 - protein, 484 aa, Homo sapiens
MNQYTEIETCVECSAKNLKNISELFYYAQKAVLHPTGPLYCPEEKEMKPACIKALTRIFKISDQDNDGTLNDAELNFFQRICFNTPLAPQALEDVKNVVRKHISDGVADSGLTLKGFLFLHTLFIQRGRHETTWTVLRRFGYDDDLDLTPEYLFPLLKIPPDCTTELNHHAYLFLQSTFDKHDLDRDCALSPDELKDLFKVFPYIPWGPDVNNTVCTNERGWITYQGFLSQWTLTTYLDVQRCLEYLGYLGYSILTEQESQASAVTVTRDKKIDLQKKQTQRNVFRCNVIGVKNCGKSGVLQALLGRNLMRQKKIREDHKSYYAINTVYVYGQEKYLLLHDISESEFLTEAEIICDVVCLVYDVSNPKSFEYCARIFKQHFMDSRIPCLIVAAKSDLHEVKQEYSISPTDFCRKHKMPPPQAFTCNTADAPSKDIFVKLTTMAMYPHVTQADPKSSTFWLRASFGATVFAVLGFAMYKALLKQR

SEQ ID NO: 948 - protein, 306 aa, Homo sapiens
MAVARLAAVAAWVPCRSWGWAAVPFGPHRGLSVLLARIPQRAPRWLPACRQKTSLSFLNRPDLPNLAYKKLKGKSPGIIFIPGYLSYMNGTKALAIEEFCKSLGHACIRFDYSGVGSSDGNSEESTLGKWRKDVLSIIDDLADGPQILVGSSLGGWLMLHAAIARPEKVVALIGVATAADTLVTKFNQLPVELKKEVEMKGVWSMPSKYSEEGVYNVQYSFIKEAEHHCLLHSPIPVNCPIRLLHGMKDDIVPWHTSMQVADRVLSTDVDVILRKHSDHRMREKADIQLLVYTIDDLIDKLSTIVN

SEQ ID NO: 949 - protein, 423 aa, Homo sapiens
MDRGQPSLEPAAAAPRASGRCVIAPVRAVLRLRRRVCVLRKRRLLQPGGGPDVGTGAPRPGCSPRAPRADLDQPKFFTFDSPAELPSRTPRKKRRRSRLVLYPETSRKYRPRVEHRSRAQRCLLLLVAIVGFQVLNAIENLDDNAQRYDLDGLEKALQRAVFGQPAAVSRIVALMRDYLATHVHSRPLLLALHGPSGVGKSHVGRLLARHFRSVLEDSALVLQYHARHHCPEARAAQDCREELARRVADVVARAEAEEKTPLLVLDDVELMPRPLLDELHGFLQPQRSHHFHNAIYVLLSGAGGAEVTRFVLQNASRALPLRPDGFRSAEAAAAQAEEDLRASLLAVLSREHPLWRAAAIVPFLLLDKRDVVSCFRDEMAGEGFFPDQARAENLAAQLSFYRVAGREFAVTGCKQVVATVNLL

SEQ ID NO: 950 - protein, 412 aa, Homo sapiens
MDTMAFSLTVPTLALKMPNGLDGMSLSPPGARVPLHYLETELEDPFAFNEEDDDLKKGATVRKKLQSKLAQNRQRQRETEILKVRQEHFSPPPAPSQQQPPQQHSHLSPLSTSLKPPAPPQGSVCKSPQPQNTSLPMQGVAPTTHTIAQARQLSHKRPLPLLPSSRAPTVDPPRTDRILMKATAFSPHFSCISRLQRLVKLCTQKHQLDTDLFPHLGLDWSEESGEEPEDSEQASPYQVAWSIRETLRYQRHVSDDDDAESRSSRVTQLCTYFQQKYKHLCRLERAESRQKKCRHTFRKALLQAASKEPECTGQLIQELRRAACSRTSISRTKLREVEPAACSGTVKGEQCANKALPFTRHCFQHILLNHSQQLFSSCTAKFADGQQCSVPVFDITHQTPLCEEHAKKWIIP

SEQ ID NO: 951 - protein, 227 aa, Homo sapiens
MGGTTSTRRVTFEADENENITVVKGIRLSENVIDRMKESSPSGSKSQRYSGAYGASVSDEELKRRVAEELALEQAKKESEDQKRLKQAKELDRERAAANEQLTRAILRERICSEEERAKAKHLARQLEEKDRVLKKQDAFYKEQLARLEERSSEFYRVTTEQYQKAAEEVEAKFKRYESHPVCADLQAKILQCYRENTHQTLKCSALATQYMHCVNHAKQSMLEKGG

SEQ ID NO: 952 - protein, 227 aa, Homo sapiens; identical to SEQ ID NO: 951

SEQ ID NO: 953 - protein, 278 aa, Homo sapiens
MPDQALQQMLDRSCWVCFATDEDDRTAEWVRPCRCRGSTKWVHQACLQRWVDEKQRGNSTARVACPQCNAEYLIVFPKLGPVVYVLDLADRLISKACPFAAAGIMVGSIYWTAVTYGAVTVMQVVGHKEGLDVMERADPLFLLIGLPTIPVMLILGKMIRWEDYVLRLWRKYSNKLQILNSIFPGIGCPVPRIPAEANPLADHVSATRILCGALVFPTIATIVGKLMFSSVNSNLQRTILGGIAFVAIKGAFKVYFKQQQYLRQAHRKILNYPEQEEA

SEQ ID NO: 954 - protein, 363 aa, Homo sapiens
MAAAAMAAAAGGGAGAARSLSRFRGCLAGALLGDCVGSFYEAHDTVDLTSVLRHVQSLEPDPGTPGSERTEALYYTDDTAMARALVQSLLAKEAFDEVDMAHRFAQEYKKDPDRGYGAGVVTVFKKLLNPKCRDVFEPARAQFNGKGSYGNGGAMRVAGISLAYSSVQDVQKFARLSAQLTHASSLGYNGAILQALAVHLALQGESSSEHFLKQLLGHMEDLEGDAQSVLDARELGMEERPYSSRLKKIGELLDQASVTREEVVSELGNGIAAFESVPTAIYCFLRCMEPDPEIPSAFNSLQRTLIYSISLGGDTDTIATMAGAIAGAYYGMDQVPESWQQSCEGYEETDILAQSLHRVFQKS

SEQ ID NO: 955 - protein, 574 aa, Homo sapiens
MEPNSLRTKVPAFLSDLGKATLRGIRKCPRCGTYNGTRGLSCKNKTCGTIFRYGARKQPSVEAVKIITGSDLQVYSVRQRDRGPDYRCFVELGVSETTIQTVDGTIITQLSSGRCYVPSCLKAATQGVVENQCQHIKLAVNCQAEATPLTLKSSVLNAMQASPETKQTIWQLATEPTGPLVQRITKNILVVKCKASQKHSLGYLHTSFVQKVSGKSLPERRFFCSCQTLKSHKSNASKDETAQRCIHFFACICAFASDETLAQEFSDFLNFDSSGLKEIIVPQLGCHSESTVSACESTASKSKKRRKDEVSGAQMNSSLLPQDAVSSNLRKSGLKKPVVASSLKRQACGQLLDEAQVTLSFQDWLASVTERIHQTMHYQFDGKPEPLVFHIPQSFFDALQQRISIGSAKKRLPNSTTAFVRKDALPLGTFSKYTWHITNILQVKQILDTPEMPLEITRSFIQNRDGTYELFKCPKVEVESIAETYGRIEKQPVLRPLELKTFLKVGNTSPDQKEPTPFIIEWIPDILPQSKIGELRIKFEYGHHRNGHVAEYQDQRPPLDQPLELAPLTTITFP

SEQ ID NO: 956 - protein, 550 aa, Homo sapiens
MAFSKLLEQAGGVGLFQTLQVLTFILPCLMIPSQMLLENFSAAIPGHRCWTHMLDNGSAVSTNMTPKALLTISIPPGPNQGPHQCRRFRQPQWQLLDPNATATSWSEADTEPCVDGWVYDRSVFTSTIVAKWDLVCSSQGLKPLSQSIFMSGILVGSFIWGLLSYRFGRKPMLSWCCLQLAVAGTSTIFAPTFVIYCGLRFVAAFGMAGIFLSSLTLMVEWTTTSRRAVTMTVVGCAFSAGQAALGGLAFALRDWRTLQLAASVPFFAISLISWWLPESARWLIIKGKPDQALQELRKVARINGHKEAKNLTIEVLMSSVKEEVASAKEPRSVLDLFCVPVLRWRSCAMLVVNFSLLISYYGLVFDLQSLGRDIFLLQALFGAVDFLGRATTALLLSFLGRRTIQAGSQAMAGLAILANMLVPQDLQTLRVVFAVLGKGCFGISLTCLTIYKAELFPTPVRMTADGILHTVGRLGAMMGPLILMSRQALPLLPPLLYGVISIASSLVVLFFLPETQGLPLPDTIQDLESQKSTAAQGNRQEAVTVESTSL

SEQ ID NO: 957 - protein, 108 aa, Homo sapiens
MSLTSSSSVRVEWIAAVTIAAGTAAIGYLAYKRFYVKDHRNKAMINLHIQKDNPKIVHAFDMEDLGDKAVYCRCWRSKKFPFCDGAHTKHNEETGDNVGPLIIKKKET

SEQ ID NO: 958 - protein, 108 aa, Homo sapiens; identical to SEQ ID NO: 957

SEQ ID NO: 959 - protein, 386 aa, Homo sapiens
PGKLFIGGLNLETDEKALEAEFGKYGRIVEVLLMKDRETNKSRGFAFVTFESPADAKAAVRDMNGKSLDGKAIKVAQATKPAFESSRRGPPPPRSRGRPRFLRGTRGGGGGPRRSPSRGGPDDDGGYAADFDLRPSRAPMPMKRGPPPRRVGPPPKRAAPSGPARSSGGGMRGRALAVRGRDGYSGPPRREPLPPRRDPYLGPRDEGYSSRDGYSSRDYREPRGFAPSPGEYTHRDYGHSSVRDDCPLRGYSDRDGYGGRDRDYGDHLSRGSHREPFESYGELRGAAPGRGTPPSYGGGGRYEEYRGYSPDAYSGGRDSYSSSYGRSDRYSRGRHRVGRPDRGLSLSMERGCPPQRDSYSRSGCRVPRGGGRLGGRLERGGGRSRY

SEQ ID NO: 960 - protein, 493 aa, Homo sapiens
MRGFGPGLTARRLLPLRLPPRPPGPRLASGQAAGALERAMDELLRRAVPPTPAYELREKTPAPAEGQCADFVSFYGGLAETAQRAELLGRLARGFGVDHGQVAEQSAGVLHLRQQQREAAVLLQAEDRLRYALVPRYRGLFHHISKLDGGVRFLVQLRADLLEAQALKLVEGPDVREMNGVLKGMLSEWFSSGFLNLERVTWHSPCEVLQKISEAEAVHPVKNWMDMKRRVGPYRRCYFFSHCSTPGEPLVVLHVALTGDISSNIQAIVKEHPPSETEEKNKITAAIFYSISLTQQGLQGVELGTFLIKRVVKELQREFPHLGVFSSLSPIPGFTKWLLGLLNSQTKEHGRNELFTDSECKEISEITGGPINETLKLLLSSSEWVQSEKLVRALQTPLMRLCAWYLYGEKHRGYALNPVANFHLQNGAVLWRINWMADVSLRGITGSCGLMANYRYFLEETGPNSTSYLGSKIIKASEQVLSLVAQFQKNSKL

SEQ ID NO: 961 - protein, 725 aa, Homo sapiens
MAAASAVSVLLVAAERNRWHRLPSLLLPPRTWVWRQRTMKYTTATGRNITKVLIANRGEIACRVMRTAKKLGVQTVAVYSEADRNSMHVDMADEAYSIGPAPSQQSYLSMEKIIQVAKTSAAQAIHPGCGFLSENMEFAELCKQEGIIFIGPPPSAIRDMGIKSTSKSIMAAAGVPVVEGYHGEDQSDQCLKEHARRIGYPVMIKAVRGGGGKGMRIVRSEQEFQEQLESARREAKKSFNDDAMLIEKFVDTPRHVEVQVFGDHHGNAVYLFERDCSVQRRHQKIIEEAPAPGIKSEVRKKLGEAAVRAAKAVNYVGAGTVEFIMDSKHNFCFMEMNTRLQVEHPVTEMITGTDLVEWQLRIAAGEKIPLSQEEITLQGHAFEARIYAEDPSNNFMPVAGPLVHLSTPRADPSTRIETGVRQGDEVSVHYDPMIAKLVVWAADRQAALTKLRYSLRQYNIVGLHTNIDFLLNLSGHPEFEAGNVHTDFIPQHHKQLLLSRKAAAKESLCQAALGLILKEKAMTDTFTLQAHDQFSPFSSSSGRRLNISYTRNMTLKDGKNNVAIAVTYNHDGSYSMQIEDKTFQVLGNLYSEGDCTYLKCSVNGVASKAKLIILENTIYLFSKEGSIEIDIPVPKYLSSVSSQETQGGPLAPMTGTIEKVFVKAGDKVKAGDSLMVMIAMKMEHTIKSPKDGTVKKVFYREGAQANRHTPLVEFEEEESDKRESE

SEQ ID NO: 962 - protein, 787 aa, Homo sapiens
MEPAGERFPEQRQVLILLLLLEVTLAGWEPRRYSVMEETERGSFVANLANDLGLGVGELAERGARVVSEDNEQGLQLDLQTGQLILNEKLDREKLCGPTEPCIMHFQVLLKKPLEVFRAELLVTDINDHSPEFPEREMTLKIPETSSLGTVFPLKKARDLDVGSNNVQNYNISPNSHFHVSTRTRGDGRKYPELVLDTELDREEQAELRLTLTAVDGGSPPRSGTVQILILVLDANDNAPEFVQALYEVQVPENSPVGSLVVKVSARDLDTGTNGEISYSLYYSSQEIDKPFELSSLSGEIRLIKKLDFETMSSYDLDIEASDGGGLSGKCSVSVKVLDVNDNFPELSISSLTSPIPENSPETEVALFRIRDRDSGENGKMICSIQDDVPFKLKPSVENFYRLVTEGALDRETRAEYNITITITDLGTPRLKTEQSITVLVSDVNDNAPAFTQTSYTLFVRENNSPALHIGSVSATDRDSGTNAQVTYSLLPPRDPHLPLTSLVSINTDNGHLFALQSLDYEALQAFEFRVGATDRGFPALSSEALVRVLVLDANDNSPFVLYPLQNGSAPCTELVPRAAEPGYLVTKVVAVDGDSGQNAWLSYQLLKATEPGLFGVWAHNGEVRTARLLSERDVAKHRLVVLVKDNGEPPRSATATLQVLLVDGFSQPYLPLPEAAPAQAQADSLTVYLVVALASVSSLFLFSVFLFVAVRLCRRSRAASVGRCSVPEGPFPGHLVDVSGTGTLSQSYQYEVCLTGGSESNDFKFLKPIFPNIVSQDSRRKSEFLE

SEQ ID NO: 963 - protein, 280 aa, Homo sapiens
MAAVVALSLRRRLPATTLGGACLQASRGAQTAAATAPRIKKFAIYRWDPDKAGDKPHMQTYKVDLNKCGPMVLDALIKIKNEVDSTLTFRRSCREGICGSCAMNINGGNTLACTRRIDTNLNKVSKIYPLPHMYVIKDLVPDLSNFYAQYKSIEPYLKKKDESQEGKQQYLQSIEEREKLDGLYECILCACCSTSCPSYWWNGDKYLGPAVLMQAYRWMIDSRDDFTEERLAKLQDPFSLYRCHTIMNCTRTCPKGLNPGKAIAEIKKMMATYKEKKASV

SEQ ID NO: 964 - protein, 730 aa, Homo sapiens [sequence omitted]

SEQ ID NO: 965 - protein, 63 aa, Homo sapiens
MAAATLTSKLYSLLFRRTSTFALTIIVGVMFFERAFDQGADAIYDHINEGKLWKHIKHKYENK

SEQ ID NO: 966 - protein, 205 aa, Homo sapiens
MGLGKTVQVISFLAAVLHKKGTREDIENNMPEFLLRSMKKEPLSSTAKKMFLIVAPLSVLYNWKDELDTWGYFRVTVLHGNRKDNELIRVKQRKCEIALTTYETLRLCLDELNSLEWSAVIVDEAHRIKNPKARVTEVMKALKCNVRIGLTGTILQNNMKELWCVMDWAVPGLLGSGTYFKKQFSDPVEHGQRHTATKRELATGR

SEQ ID NO: 967 - protein, 1211 aa, Homo sapiens [sequence omitted]

SEQ ID NO: 968 - protein, 357 aa, Homo sapiens
MAFAPMGPEASFFDVLDRHRESLLAALRRGGREPPTGGSRLASFEDSVGLQMVSHCTTRKIKSDSPKSAQKFSLILKILSMIYKLVQSNTYATKRDIYYTDSQLFGNQTVVDNIINDISCMLKVSRRSLHILSTSKGLIAGNLRYIEEDGTKVNCTCGATAVAVPSNIQGIRNLVTDAKFVLIVEKDATFQRLLDDNFCNKLSPCIMITGKGVPDLNTRLLVKKLWDTFHVPVFTLVDADPHGIEIMCIYKYGSMSMSFEAHHLTVPAIRWLGLLPSDLKRLNVPKDSLIPLTKRDQMKLDSILRRPYVTCQPFWRKEMEIMADSKMKAEIQALTFLSSDYLSRVYLPNKLKFGGWI

SEQ ID NO: 969 - protein, 233 aa, Homo sapiens
MAGVRSLRCSRGCAGGCECGDKGKCSDSSLLGKRLSEDSSRHQLLQKWASMWSSMSEDASVADMERAQLEEEAAAAEERPLVFLCSGCRRPLGDSLSWVASQEDTNCILLRCVSCNVSVDKEQKLSKREKENGCVLETLCCAGCSLNLGYVYRCTPKNLDYKRDLFCLSVEAIESYVLGSSEKQIVSEDKELFNLESRVEIEKSLTQMEDVLKALQMKLWEAESKLSFATCKS

SEQ ID NO: 970 - protein, 582 aa, Homo sapiens
MMKLRHKNKKPGEGSKGHKKISWPYPQPAKQNGKKATSKVPSAPHFVHPNDHANREAELKKKWVEEMREKQQAAREQERQKRRTIESYCQDVLRRQEEFEHKEEVLQELNMFPQLDDEATRKAYYKEFRKVVEYSDVILEVLDARDPLGCRCFQMEEAVLRAQGNKKLVLVLNKIDLVPKEVVEKWLDYLRNELPTVAFKASTQHQVKNLNRCSVPVDQASESLLKSKACFGAENLMRVLGNYCRLGEVRTHIRVGVVGLPNVGKSSLINSLKRSRACSVGAVPGITKFMQEVYLDKFIRLLDAPGIVPGPNSEVGTILRNCVHVQKLADPVTPVETILQRCNLEEISNYYGVSGFQTTEHFLTAVAHRLGKKKKGGLYSQEQAAKAVLADWVSGKISFYIPPPATHTLPTHLSAEIVKEMTEVFDIEDTEQANEDTMECLATGESDELLGDTDPLEMEIKLLHSPMTKIADAIENKTTVYKIGDLTGYCTNPNRHQMGWAKRNVDHRPKSNSMVDVCSVDRRSVLQRIMETDPLQQGQALASALKNKKKMQKRADKIASKLSDSMMSALDLSGNADDGVGD

SEQ ID NO: 971 - protein, 582 aa, Homo sapiens; identical to SEQ ID NO: 970

SEQ ID NO: 972 - protein, 428 aa, Homo sapiens
MRRTKEYVSNDAAQSDDEEKLQSQPTDTDGGRLKQKTTQLKKFLGKSVKRAKHLAEEYGERAINKVKSVRDEVFHTDQDDPSSSDDEGMPYTRPVKFKAAHGFKGPYDFDQIKVVQDLSGEHMGAVWTMKFSHCGRLLASAGQDNVVRIWALKNAFDYFNNMRMKYNTEGRVSPSPSQESLSSSKSDTDTGVCSGTDEDPDDKNAPFRQRPFCKYKGHTADLLDLSWSKNYFLLSSSMDKTVRLWHISRRECLCCFQHIDTAIAFHPRDDRYFLSGSLDGKLRLWNIPDKKVALWNEVDGQTKLITAANFCQNGKYAVIGTYDGRCIFYDTEHLKYHTQIHVRSTRGRNKVGRKITGIEPLPGENKILVTSNDSRIRLYDLRDLSLSMKYKGYVNSSSQIKQVSAMILLTSLVVQKISMFISGVPTMT

SEQ ID NO: 973 - protein, 643 aa, Homo sapiens
MCGICCSVNFSAEHFSQDLKEDLLYNLKQRGPNSSKQLLKSDVNYQCLFSAHVLHLRGVLTTQPVEDERGNVFLWNGEIFSGIKVEAEENDTQILFNYLSSCKNESEILSLFSEVQGPWSFIYYQASSHYLWFGRDFFGRRSLLWHFSNLGKSFCLSSVGTQTSGLANQWQEVPASGLFRIDLKSTVISRCIILQLYPWKYISRENIIEENVNSLSQISADLPAFVSVVANEAKLYLEKPVVPLNMMLPQAALETHCSNISNVPPTREILQVFLTDVHMKEVIQQFIDVLSVAVKKRVLCLPRDENLTANEVLKTCDRKANVAILFSGGIDSMVIATLADRHIPLDEPIDLLNVAFIAEEKTMPTTFNREGNKQKNKCEIPSEEFSKDVAAAAADSPNKHVSVPDRITGRAGLKELQAVSPSRIWNFVEINVSMEELQKLRRTRICHLIRPLDTVLDDSIGCAVWFASRGIGWLVAQEGVKSYQSNAKVVLTGIGADEQLAGYSRHRVRFQSHGLEGLNKEIMMELGRISSRNLGRDDRVIGDHGKEARFPFLDENVVSFLNSLPIWEKANLTLPRGIGEKLLLRLAAVELGLTASALLPKRAMQFGSRIAKMEKINEKASDKCGRLQIMSLENLSIEKETKL

SEQ ID NO: 974 - protein, 217 aa, Homo sapiens
MSFRGGGRGGFNRGGGGGGFNRGGSSNHFRGGGGGGGGGNFRGGGRGGFGRGGGRGGFNKGQDQGPPERVVLLGEFLHPCEDDIVCKCTTDENKVPYFNAPVYLENKEQIGKVDEIFGQLRDFYFSVKLSENMKASSFKKLQKFYIDPYKLLPLQRFLPRPPGEKGPPRGGGRGGRGGGRGGGGRGGGRGGGFRGGRGGGGGGFRGGRGGGFRGRGH

SEQ ID NO: 975 - protein, 373 aa, Homo sapiens
MPDELTEPGRATPARASSFLIENLLAAEAKGAGRDPGRRQPGGRGGGRRRPRRRGRRAGRRRRLQRRRQLLAGTGPGGEARAVPARAGALGLGPRPPPGPGPPFALGCGGAGRWYPRAHGGYGGGLSPDTSDRDSPETGEEMGRAEGAWPRGPGRSGAAGGSGAGGAWPGGRHGGGSELAEVPAAAGETRGGVGVGGGRKKKTRTVFSRSQVFQLESTFDLKRYLSTAERAGLAASLQLTETQVKIWFQNRRNKWKRHVAAELEAASLSPPGAHAWSACRCSTTKAPRPRPPLGPRPPCPSRWPAGPRRPHRCSASPGPSPTRWPPSRPPPPCPFCGRRCLAWCEPRLPGPLPTTLWTCVDARSAAGAGLRGR

SEQ ID NO: 976 - protein, 45 aa, Homo sapiens
LKPDTVPAPCCVPASYNPMVLIQKADTGVSLQTYDDLLAKDCHCI

SEQ ID NO: 977 - protein, 226 aa, Homo sapiens
LSALSLAKDSLVGGITNPGEVFCSVPGRLSLLSSTSKYKVTVGEVQRRLSPPECLNASLLGGVLRRAKSKNGGRCLRERLEKIGLNLPAGRRKAANVTLLTSLVEGEAVHLARDFGYVCETEFPAKAAAEYLCRQHADPGELHSRKSMLLAAKQICKEFADLMAQDRSPLGNSRPALILEPGVQSCLTHFSLITHGFGGPAICAALTAFQNYLLESLKGLDKMFLS

SEQ ID NO: 978 - protein, 79 aa, Homo sapiens
MHPDLSPHLHTEECNVLINLLKECHKNHNILKFFGYCNDVDRELRKCLKNEYVENRTKSREHGIAMRKKLFNPPEESEK

SEQ ID NO: 979 - protein, 360 aa, Homo sapiens
MAPLGTTVLLWSLLRSSPGVERVCFRARIQPWHGGLLQPLPCSFEMGLPRRRFSSEAAESGSPETKKPTFMDEEVQSILTKMTGLNLQKTFKPAIQELKPPTYKLMTQAQLEEATRQAVEAAKVRLKMPPVLEERVPINDVLAEDKILEGTETTKYVFTDISYSIPHRERFIVVREPSGTLRKASWEERDRMIQVYFPKEGRKILTPIIFKEENLRTMYSQDRHVDVLNLCFAQFEPDSTEYIKVHHKTYEDIDKRGKYDLLRSTRYFGGMVWYFVNNKKIDGLLIDQIQRDLIDDATNLVQLYHVLHPDGQSAQGAKDQAAEGINLIKVFAKTEAQKGAYIELTLQTYQEALSRHSAAS

SEQ ID NO: 980 - protein, 1555 aa, Homo sapiens
MGCKGDASGACAAGALPVTGVCYKMGVLVVLTVLWLFSSVKADSKAITTSLTTKWFSTPLLLEASEFLAEDSQEKFWNFVEASQNIGSSDHDGTDYSYYHAILEAAFQFLSPLQQNLFKFCLSLRSYSATIQAFQQIAADEPPPEGCNSFFSVHGKKTCESDTLEALLLTASERPKPLLFKGDHRYPSSNPESPVVIFYSEIGSEEFSNFHRQLISKSNAGKINYVFRHYIFNPRKEPVYLSGYGVELAIKSTEYKAKDDTQVKGTEVNTTVIGENDPIDEVQGFLFGKLRDLHPDLEGQLKELRKHLVESTNEMAPLKVWQLQDLSFQTAARILASPVELALVVMKDLSQNFPTKARAITKTAVSSELRTEVEENQKYFKGTLGLQPGDSALFINGLHMDLDTQDIFSLFDVLRNEARVMEGLHRLGIEGLSLHNVLKLNIQPSEADYAVDIRSPAISWVNNLEVDSRYNSWPSSLQELLRPTFPGVIRQIRKNLHNMVFIVDPAHETTAELMNTAEMFLSNHIPLRIGFIFVVNDSEDVDGMQDAGVAVLRAYNYVAQEVDDYHAFQTLTHIYNKVRTGEKVKVEHVVSVLEKKYPYVEVNSILGIDSAYDRNRKEARGYYEQTGVGPLPVVLFNGMPFEREQLDPDELETITMHKILETTTFFQRAVYLGELPHDQDVVEYIMNQPNVVPRINSRILTAERDYLDLTASNNFFVDDYARFTILDSQGKTAAVANSMNYLTKKGMSSKEIYDDSFIRPVTFWIVGDFDSPSGRQLLYDAIKHQKSSNNVRISMINNPAKEISYENTQISRAIWAALQTQTSNAAKNFITKMAKEGAAEALAAGADIAEFSVGGMDFSLFKEVFESSKMDFILSHAVYCRDVLKLKKGQRAVISNGRIIGPLEDSELFNQDDFHLLENIILKTSGQKIKSHIQQLRVEEDVASDLVMKVDALLSAQPKGDPRIEYQFFEDRHSAIKLRPKEGETYFDVVAVVDPVTREAQRLAPLLLVLAQLINMNLRVFMNCQSKLSDMPLKSFYRYVLEPEISFTSDNSFAKGPIAKFLDMPQSPLFTLNLNTPESWMVESVRTPYDLDNIYLEEVDSVVAAEYELEYLLLEGHCYDITTGQPPRGLQFTLGTSANPVIVDTIVMANLGYFQLKANPGAWILRLRKGRSEDIYRIYSHDGTDSPPDADEVVIVLNNFKSKIIKVKVQKKADMVNEDLLSDGTSENESGFWDSFKWGFTGQKTEEVKQDKDDIINIFSVASGHLYERFLRIMMLSVLKNTKTPVKFWFLKNYLSPTFKEFIPYMANEYNFQYELVQYKWPRWLHQQTEKQRIIWGYKILFLDVLFPLVVDKFLFVDADQIVRTDLKELRDFNLDGAPYGYTPFCDSRREMDGYRFWKSGYWASHLAGRKYHISALYVVDLKKFRKIAAGDRLRGQYQGLSQDPNSLSNLDQDLPNNMIHQVPIKSLPQEWLWCETWCDDASKKRAKTIDLCNNPMTKEPKLEAAVRIVPEWQDYDQEIKQLQIRFQKEKETGALYKEKTKEPSREGPQKREEL

SEQ ID NO: 981 - protein, 142 aa, Homo sapiens
MAAAVAAAGAGEPQSPDELLPKGDAEKPEEELEEDDDEELDETLSERLWGLTEMFPERVRSAAGATFDLSLFVAQKMYRFSRAALWIGTTSFMILVLPVVFETEKLQMEQQQQLQQRQILLGPNTGLSGGMPGALPSLPGKI

SEQ ID NO: 982 - protein, 142 aa, Homo sapiens; identical to SEQ ID NO: 981

SEQ ID NO: 983 - protein, 383 aa, Homo sapiens [sequence omitted]

SEQ ID NO: 984 - protein, 64 aa, Homo sapiens
EKNGGEPDDAELVRLSKRLVENAVLKAVQQYLEETQNKNKPGEGSSVKTEAADQNGNDNENNRK

SEQ ID NO: 985 - protein, 359 aa, Homo sapiens
MRAAAMTTAILERLSTLSVSGQQLRRLPKILEDGLPKMPCTVPETDVPQLFREPYIRTGYRPTGHEWRYYFFSLFQKHNEVVNVWTHLLAALAVLLRFWAFAEAEALPWASTHSLPLLLFILSSITYLTCSLLAHLLQSKSELSHYTFYFVDYVGVSVYQYGSALAHFFYSSDQAWYDRFWLFFLPAAAFCGWLSCAGCCYAKYRYRRPYPVMRKICQVVPAGLAFILDISPVAHRVALCHLAGCQEQAAWYHTLQILFFLVSAYFFSCPVPEKYFPGSCDIVGHGHQIFHAFLSICTLSQLEAILLDYQGRQEIFLQRHGPLSVHMACLSFFFLAACSAATAALLRHKVKARLTKKDS

SEQ ID NO: 986 - protein, 479 aa, Homo sapiens
MVGRSRRRGAAKWAAVRAKAGPTLTDENGDDLGLPPSPGDTSYYQDQVDDFHEARSRAALAKGWNEVQSGDEEDGEEEEEEVLALDMDDEDDEDGGNAGEEEEEENADDDGGSSVQSEAEASVDPSLSWGQRKKLYYDTDYGSKSRGRQSQQEAEEEEREEEEEAQIIQRRLAQALQEDDFGVAWVEAFAKPVPQVDEAETRVVKDLAKVSVKEKLKMLRKESPELLELIEDLKVKLTEVKDELEPLLELVEQGIIPPGKGSQYLRTKYNLYLNYCSNISFYLILKARRVPAHGHPVIERLVTYRNLINKLSVVDQKLSSEIRHLLTLKDDAVKKELIPKAKSTKPKPKSVSKTSAAACAVTDLSDDSDFDEKAKLKYYKEIEDRQKLKRKKEENSTEEQALEDQNAKRAITYQIAKNRGLTPRRKKIDRNPRVKHREKFRRAKIRRRGQVREVRKEEQRYSGELSGIRAGVKKSIKLK

SEQ ID NO: 987 - protein, 91 aa, Homo sapiens
MAASSRAQVLSLYRAMLRESKRFSAYNYRTYAVRRIRDAFRENKNVKDPVEIQTLVNKAKRDLGVIRRQVHIGQLYSTDKLIIENRDMPRT

SEQ ID NO: 988 - protein, 421 aa, Homo sapiens
MRWILFIGALIGSSICGREKFFGDQVLRINVRNGDEISKLSQLVNSNNLKLNFWKSPSSFNRPVDVLVPSVSLQAFKSFLRSQGLEYAVTIEDLQALLDNEDDEMQHNEGQERSSNNFNYGAYHSLEAIYHEMDNIAADFPDLARRVKIGHSFENRPMYVLKFSTGKGVRRPAVWLNAGIHSREWISQATAIWTARKIVSDYQRDPAITSILEKMDIFLLPVANPDGYVYTQTQNRLWRKTRSRNPGSSCIGADPNRNWNASFAGKGASDNPCSEVYHGPHANSEVEVKSVVDFIQKHGNFKGFIDLHSYSQLLMYPYGYSVKKAPDAEELDKVARLAAKALASVSGTEYQVGPTCTTVYPASGSSIDWAYDNGIKFAFTFELRDTGTYGFLLPANQIIPTAEETWLGLKTIMEHVRDNLY

SEQ ID NO: 989 - protein, 72 aa, Homo sapiens
MSSKTASTNNIAQARRTVQQLRLEASIERIKVSKASADLMSYCEEHARSDPLLIGIPTSENPFKDKKTCIIL

SEQ ID NO: 990 - protein, 406 aa, Homo sapiens
MEQFNPGLRNLINLGKNYEKAVNAMILAGKAYYDGVAKIGEIATGSPVSTELGHVLIEISSTHKKLNESLDENFKKFHKEIIHELEKKIELDVKYMNATLKRYQTEHKNKLESLEKSQAELKKIRRKSQGSRNALKYEHKEIEYVETVTSRQSEIQKFIADGCKEALLEEKRRFCFLVDKHCGFANHIHYYHLQSAELLNSKLPRWQETCVDAIKVPEKIMNMIEEIKTPASTPVSGTPQASPMIERSNVVRKDYDTLSKCSPKMPPAPSGRAYTSPLIDMFNNPATAAPNSQRVNNSTGTSEDPSLQRSVSVATGLNMMKKQKVKTIFPHTAGSNKTLLSFAQGDVITLLIPEEKDGWLYGEHDVSKARGWFPSSYTKLLEENETEAVTVPTPSPTPVRSFSGEA

SEQ ID NO: 991 - protein, 1249 aa, Homo sapiens
QMIPSNSTRLPVAYQGNQGLNQSFSEQQVDWTQQCISKGLTYPDYRPPPKLYRYSPQSFLPDSTIQKQNFIPHTSLQVKNSQLPNSVLTLPSRQTSAVPSQQYATQTDKRPPPPPYNCRYGSQPLQSTQHITKHLSMEVPQSQEMLSSEIRTSFQQQWQNPNENVSTIGNFTNLKVNTNSKQPFNGPIRSSVDGVQTLAQTNEEKIMDSCNPTSNQVLDTSVAKEKLVRDIKTLVEIKQKFSELARKIKINKDLLMAAGCIKMTNTSYSEPAQNSKLSLKQTAKIQSGPQITPVMPENAERQTPTVVESAETNKTQCMLNSDIQEVNCRRFNQVDSVLPNPVYSEKRPMPDPSHDVKVLTSKTSAVEMTQAVLNTQLSSENVTKVEQNSPAVCETISVPKSMSTEEYKSKIQNENMLLLALLSQARKTQKTVLKDANQTIQDSKPDSCEMNPNTQMTGNQLNLKNMETPSTSNVSGRVLDNSFCSGQESSTKGMPAKSDSSCSMEVLATCLSLWKKQPSDTAKEKECDKLRTNTTAVGISKPANIHVKSPCSVVGNSNSQNKISNPSQQTALSMVMHNYESSGINITKGTELQIAVVSPLVLSEVKTLSVKGITPAVLPETVYPVIKEGSVCSLQNQLAENAKATAALKVDVSGPVASTATSTKIFPLTQKEKQNESTNGNSEVTPNVNQGKHNKLESAIHSPMNDQQISQESRNSTVVSSDTLQIDNICSLVEGDTSYNSQIAKIFSSLPLKMVEPQKPSLPNQQGIGSREPEKQLDNTTENKDFGFQKDKPVQCTDVSHKICDQSKSEPPLESSFNNLETNRVILEKSSLEHATEKSTANDTCSSAAIQEDIYPQEIDASSNYTPQDPARNEIHSDKAPVLYLHDQLSELLKEFPYGIEAVNTREGSVGQQTTYQTSEDQTADKTSSDSKDPADQIQITILSSEQMKEIFPEQDDQPYVVDKLAEPQKEEPITEVVSQCDLQAPAAGQSRDSVILDSEKDDIHCCALGWLSMVYEGVPQCQCNSIKNSSSEEEKQKEQCSPLDTNSCKQGERTSDRDVTVVQFKSLVNNPKTPPDGKSHFPELQDDSRKDTPKTKHKSLPRTEQELVAGQFSSKCDKLNPLQNHKRKKLRFHEVTFHSSNKMTASYEQASQETRQKKHVTQNSRPLKTKTAFLPNKDVYKKHSSLGQSLSPEKIKLKLKSVSFKQKRKLDQGNVLDMEVKKKKHDTQDAEKNDLASKGHSPHPQRLK

SEQ ID NO: 992 - protein, 1596 aa, Homo sapiens
RARVRVHDLHVGITKRLKTMEVLEGESCSFECVLSHESASDPAMWTVGGKTVGSSSRFQATRQGRKYILVVREAAPSDAGEVVFSVRGLTSKASLIVRERPAAIIKPLEDQWVAPGEDVELRCELSRAGTPVHWLKDRKAIRKSQKYDVVCEGTMAMLVIRGASLKDAGEYTCEVEASKSTASLHVEEKANCFTEELTNLQVEEKGTAVFTCKTEHPAATVTWRKGLLELRASGKHQPSQEGLTLRLTISALEKADSDTYTCDIGQAQSRAQLLVQGRRVHIIEDLEDVDVQEGSSATFRCRISPANYEPVHWFLDKTPLHANELNEIDAQPGGYHVLTLRQLALKDSGTIYFEAGDQRASAALRVTEKPSVFSRELTDATITEGEDLTLVCETSTCDIPVCWTKDGKTLRGSARCQLSHEGHRAQLLITGATLQDSGRYKCEAGGACSSSIVRVHARPVRFQEALKDLEVLEGGAATLRCVLSSVAAPVKWCYGNNVLRPGDKYSLRQEGAMLELVVRNLRPQDSGRYSCSFGDQTTSATLTVTALPAQFIGKLRNKEATEGATATLRCELSKAAPVEWRKGSETLRDGDRYCLRQDGAMCELQIRGLAMVDAAEYSCVCGEERTSASLTIRPMPAHFIGRLRHQESIEGATATLRCELSKAAPVEWRKGRESLRDGDRHSLRQDGAVCELQICGLAVADAGEYSCVCGEERTSATLTVKALPAKFTEGLRNEEAVEGATAMLWCELSKVAPVEWRKGPENLRDGDRYILRQEGTRCELQICGLAMADAGEYLCVCGQERTSATLTIRALPARFIEDVKNQEAREGATAVLQCELNSAAPVEWRKGSETLRDGDRYSLRQDGTKCELQIRGLAMADTGEYSCVCGQERTSAMLTVRALPIKFTEGLRNEEATEGATAVLRCELSKMAPVEWWKGHETLRDGDRHSLRQDGARCELQIRGLVAEDAGEYLCMCGKERTSAMLTVRAMPSKFIEGLRNEEATEGDTATLWCELSKAAPVEWRKGHETLRDGDRHSLRQDGSRCELQIRGLAVVDAGEYSCVCGQERTSATLTVRALPARFIEDVKNQEAREGATAVLQCELSKAAPVEWRKGSETLRGGDRYSLRQDGTRCELQIHGLSVADTGEYSCVCGQERTSATLTVRALPARFTQDLKTKEASEGATATLQCELSKVAPVEWKKGPETLRDGGRYSLKQDGTRCELQIHDLSVADAGEYSCMCGQERTSATLTVRALPARFTEGLRNEEAMEGATATLQCELSKAAPVEWRKGLEALRDGDKYSLRQDGAVCELQIHGLAMADNGVYSCVCGQERTSATLTVRALPARFIEDMRNQKATEGATVTLQCKLRKAAPVEWRKGPNTLKDGDRYSLKQDGTSCELQIRGLVIADAGEYSCICEQERTSATLTVRALPARFIEDVRNHEATEGATAVLQCELSKAAPVEWRKGSETLRDGDRYSLRQDGTRCELQIRGLAVEDTGEYLCVCGQERTSATLTVRALPARFIDNMTNQEAREGATATLHCELSKVAPVEWRKGPETLRDGDRHSLRQENRLNPGGGGCSELGSCHCSPAWTAKLDFIS

SEQ ID NO: 993 - protein, 544 aa, Homo sapiens
KGLTSFCSSKTMAHGSVTFRDVAIDFSQEEWEFLDPAQRDLYRDVMWENYSNFISLGPSISKPDVITLLDEERKEPGMVVREGTRRYCPDLESRYRTNTLSPEKDIYEIYSFQWDIMERIKSYSLQGSIFRNDWECKSKIEGEKEQQEGYFGQVKITSEKMTTYKRHNFLTEYQIVHNGEKVYECKECRKTFIRRSTLSQHLRIHTGEKPYKCKECGQAFRQRAHLIRHHKLHTGEKPYECKECGKAFTVLQELTQHQRLHTGEKPYECKECGKAFRVHQQLARHQRIHTGEKPYECKDCGKTFRQCTHLTRHQRLHTAEKLYECKECGKAFVCGPDLRVHQKIHFGEKPYECKECGKAFRICQQLTVHQSIHTGEKPYECKECGKTFRLRQQLVRHQRIHTREKPYECMECWKTFSSYSQLISHQSIHIGERPYECEECGKAFRLLSQLTQHQSIHTGEKPYECKECRKPFRLLSQLTQHQSIHTGEKPYECKECGKAFRLYSFLTQHQRIHTGEKPYKCKECKKAFRQHSHLTQHQKIHNGI

SEQ ID NO: 994 - protein, 1151 aa, Homo sapiens
PVFSYVLPKRNLTHMQDEVNVKSHQREHQNIQDLEIENEDLKERLRKIQQEQRILLDKVNGLQLQLNEEVMVADDLESEREKLKSLLAAKEKQHEESLRTIEALKNRFKYFESDHLGSGSHFSNRKEDMLLKQGQMYMADSQCTSPGIPAHMQSRSMLRPLELSLPSQTSYSENEILKKELEAMRTFCESAKQDRLKLQNELAHKVAECKALALECERVKEDSDEQIKQLEDALKDVQKRMYESEGKVKQMQTHFLALKEHLTSEAASGNHRLTEELKDQLKDLKVKYEGASAEVGKLRNQIKQNEMIVEEFKRDEGKLIEENKRLQKELSMCEMEREKKGRKVTEMEGQAKELSAKLALSIPAEKFENMKSSLSNEVNEKAKKLVEMEREHEKSLSEIRQLKRELENVKAKLAQHVKPEEHEQVKSRLEQKSGELGKKITELTLKNQTLQKEIEKVYLDNKLLKEQAHNLTIEMKNHYVPLKVSEDMKKSHDAIIDDLNRKLLDVTQKYTEKKLEMEKLLLENDSLSKDVSRLETVFVPPEKHEKEIIALKSNIVELKKQLSELKKKCGEDQEKIHALTSENTNLKKMMSNQYVPVKTHEEVKMTLNDTLAKTNRELLDVKKKFEDINQEFVKIKDKNEILKRNLENTQNQIKAEYISLAEHEAKMSSLSQSMRKVQDSNAEILANYRKGQEEIVTLHAEIKAQKKELDTIQECIKVKYAPIVSFEECERKFKATEKELKDQLSEQTQKYSVSEEEVKKNKQENDKLKKEIFTLQKDLRDKTVLIEKSHEMERALSRKTDELNKQLKDLSQKYTEVKNVKEKLVEENAKQTSEILAVQNLLQKQHVPLEQVEALKKSLNGTIENLKEELKSMQRCYEKEQQTVTKLHQLLENQKNSSVPLAEHLQIKEAFEKEVGIIKASLREKEEESQNKMEEVSKLQSEVQNTKQALKKLETREVVDLSKYKATKSDLETQISSLNEKLANLNRKYEEVCEEVLHAKKKEISAKDEKELLHFSIEQEIKDQKERCDKSLTTITELQRRIQESAKQIEAKDNKITELLNDVERLKQALNGLSQLTYTSGNPTKRQSQLIDTLQHQVKSLEQQLADADRQHQEVIAIYRTHLLSAAQGHMDEDVQEALLQIIQMRQGLVC

SEQ ID NO: 995 - protein, 924 aa, Homo sapiens
SRSRVPVPGPGAAAAPCPAPASPRRHPSANIPEIKRYAAAAAAAAGPGAGGAGDRGEAAPAAAMEALGPGPPASLFQPPRRPGLGTVGKPIRLLANHFQVQIPKIDVYHYDVDIKPEKRPRRVNREVVDTMVRHFKMQIFGDRQPGYDGKRNMYTAHPLPIGRDRVDMEVTLPGEGKDQTFKVSVQWVSVVSLQLLLEALAGHLNEVPDDSVQALDVITRHLPSMRYTPVGRSFFSPPEGYYHPLGGGREVWFGFHQSVRPAMWNMMLNIDVSATAFYRAQPIIEFMCEVLDIQNINEQTKPLTDSQRVKFTKEIRGLKVEVTHCGQMKRKYRVCNVTRRPASHQTFPLQLENGQAMECTVAQYFKQKYSLQLKYPHLPCLQVGQEQKHTYLPLEVCNIVAGQRCIKKLTDNQTSTMIKATARSAPDRQEEISRLVKSNSMVGGPDPYLKEFGIVVHNEMTELTGRVLPAPMLQYGGRNKTVATPNQGVWDMRGKQFYAGIEIKVWAVACFAPQKQCREDLLKSFTDQLRKISKDAGMPIQGQPCFCKYAQGADSVEPMFKHLKMTYVGLQLIVVILPGKTPVYAEVKRVGDTLLGMATQCVQVKNVVKTSPQTLSNLCLKINAKLGGINNVLVPHQRPSVFQQPVIFLGADVTHPPAGDGKKPSIAAVVGSMDGHPSRYCATVRVQTSRQEISQELLYSQEVIQDLTNMVRELLIQFYKSTRFKPTRIIYYRGGVSEGQMKQVAWPELIAIRKACISLEEDYRPGITYIVVQKRHHTRLFCADKTERVGKSGNVPAGTTVDSTITHPSEFDFYLCSHAGIQGTSRPSHYQVLWDDNCFTADELQLLTYQLCHTYVRCTRSVSIPAPAYYARLVAFRARYHLVDKDHDSAEGSHVSGQSNGRDPQALAKAVQIHHDTQHTMYFA

SEQ ID NO: 996 - protein, 670 aa, Homo sapiens
KQMFQLHIGNVYEAGKLNLLTVIQLLNEVLKVMKYERCQADQARLTVDLHYLEKETKFQKERLSDLKHMRYRIKDDLTTIRHSVVEKQGEWHKKWKEFLGLSPFSLIKGWTPSVDLLPPMSPLSFDPASEEVYAKSILCQYPASLPDAHKQHNQENGCRGDSDTLGALHDLANSPASFLSQSVSSSDRNSVTVLEKDTKMGTPKEKNEAISKKIPEFEVENSPLSDVAKNTESSAFGGSLPAKKSDPFQKEQDHLVEEVARAVLSDSPQLSEGKEIKLEELIDSLGSNPFLTRNQIPRTPENLITEIRSSWRKAIEMEENRTKEPIQMDAEHREVLPESLPVLHNQREFSMADFLLETTVSDFGQSHLTEEKVISDCECVPQKHVLTSHIDEPPTQNQSDLLNKKVICKQDLECLAFTKLSETSRMETFSPAVGNRIDVMGGSEEEFMKILDHLEVSCNKPSTNKTMLWNSFQISSGISSKSFKDNDFGILHETLPEEVGHLSFNSSSSSEANFKLEPNSPMHGGTLLEDVVGGRQTTPESDFNLQALRSRYEALKKSLSKKREESYLSNSQTPERHKPELSPTPQNVQTDDTLNFLDTCDLHTEHIKPSLRTSIGERKRSLSPLIKFSPVEQRLRTTIACSLGELPNLKEEDILNKSLDAKEPPSDLTR

SEQ ID NO: 997 - protein, 1202 aa, Homo sapiens
QKAAFTCIKNLWNRKPLKVYGGRMAESMLAILCHILRGEPVIRERLSKEKEGSRGEEDTGQEEGGSRREPQVNQQQLQQLMDMGFTREHAMEALLNTSTMEQATEYLLTHPPPIMGGVVRDLSMSEEDQMMRAIAMSLGQDIPMDQRAESPEEVACRKEEEERKAREKQEEEEAKCLEKFQDADPLEQDELHTFTDTMLPGCFHLLDELPDTVYRVCDLIMTAIKRNGADYRDMILKQVVNQVWEAADVLIKAALPLTTSDTKTVSEWISQMATLPQASNLATRILLLTLLFEELKLPCAWVVESSGILNVLIKLLEVVQPCLQAAKEQKEVQTPKWITPVLLLIDFYEKTAISSKRRAQMTKYLQSNSNNWRWFDDRSGRWCSYSASNNSTIDSAWKSGETSVRFTAGRRRYTVQFTTMVQVNEETGNRRPVMLTLLRVPRLNKNSKNSNGQELEKTLEESKEMDIKRKENKGNDTPLALESTNTEKETSLEETKIGEILIQGLTEDMVTVLIRACVSMLGVPVDPDTLHATLRLCLRLTRDHKYAMMFAELKSTRMILNLTQSSGFNGFTPLVTLLLRHIIEDPCTLRHTMEKVVRSAATSGAGSTTSGVVSGSLGSREINYILRVLGPAACRNPDIFTEVANCCIRIALPAPRGSGTASDDEFENLRIKGPNAVQLVKTTPLKPSPLPVIPDTIKEVIYDMLNALAAYHAPEEADKSDPKPGVMTQEVGQLLQDMGDDVYQQYRSLTRQSSDFDTQSGFSINSQVFAADGASTETSASGTSQGEASTPEESRDGKKDKEGDRASEEGKQKGKGSKPLMPTSTILRLLAELVRSYVGIATLIANYSYTVGQSELIKEDCSVLAFVLDHLLPHTQNAEDKDTPALARLFLASLAAAGSGTDAQVALVNEVKAALGRALAMAESTEKHARLQAVMCIISTIMESCPSTSSFYSSATAKTQHNGMNNIIRLFLKKGLVNDLARVPHSLDLSSPNMANTVNAALKPLETLSRIVNQPSSLFGSKSASSKNKSEQDAQGASQDSSSNQQDPGEPGEAEVQEEDHDVTQTEVADGDIMDGEAETDSVVIAGQPEVLSSQEMQVENELEDLIDELLERDGGSGNSTIIVSRSGEDESQEDVLMDEAPSNLSQASTLQANREDSMNILDPEDEEEHTQERRIAAEEKKKQDELKRIARELAEDDSILK

SEQ ID NO: 998 - protein, 1448 aa, Homo sapiens
GISNSVWGLSPGNPATGNSNSGFSQGNGDTVNSALSAKQNGSSSAVQKEGSGGNAWDSGPPAGPGILAWGRGSGNNGVGNIHSGAWGHPSRSTSNGVNGEWGKPPNQHSNSDINGKGSTGWESPSVTSQNPTVQPGGEHMNSWAKAASSGTTASEGSSDGSGNHNEGSTGREGTGEGRRRDKGIIDQGHIQLPRNDLDPRVLSNTGWGQTPVKQNTAWEFEESPRSERKNDNGTEAWGCAATQASNSGGKNDGSIMNSTNTSSVSGWVNAPPAAVPANTGWGDSNNKAPSGPGVWGDSISSTAVSTAAAAKSGHAWSGAANQEDKSPTWGEPPKPKSQHWGDGQRSNPAWSAGGGDWADSSSVLGHLGDGKKNGSGWDADSNRSGSGWNDTTRSGNSGWGNSTNTKANPGTNWGETLKPGPQQNWASKPQDNNVSNWGGAASVKQTGTGWIGGPVPVKQKDSSEATGWEEPSPPSIRRKMEIDDGTSAWGDPSNYNNKTVNMWDRNNPVIQSSTTTNTTTTTTTTTSNTTHRVETPPPHQAGTQLNRSPLLGPGRKVSSGWGEMPNVHSKTENSWGEPSSPSTLVDNGTAAWGKPPSSGSGWGDHPAEPPVAFGRAGAPVAASALCKPASKSMQEGWGSGGDEMNLSTSQWEDEEGDVWNNAASQESTSSCSSWGNAPKKGLQKGMKTSGKQDEAWIMSRLIKQLTDMGFPREPAEEALKSNNMNLDQAMSALLEKKVDVDKRGLGVTDHNGMAAKPLGCRPPISKESSVDRPTFLDKDGGLVEEPTPSPFLPSPSLKLPLSHSALPSQALGGIASGLGMQNLNSSRQIPSGNLGMFGNSGAAQARTMQQPPQPPVQPLNSSQPSLRAQVPQFLSPQVQAQLLQFAAKNIGLNPALLTSPINPQHMTMLNQLYQLQLAYQRLQIQQQMLQAQRNVSGSMRQQEQQVARTITNLQQQIQQHQRQLAQALLVKQPPPPPPPPHLSLHPSAGKSAMDSFPSHPQTPGLPDLQTKEQQSSPNTFAPYPLAGLNPNMNVNSMDMTGGLSVKDPSQSQSRLPQWTHPNSMDNLPSAASPLEQNPSKHGAIPGGLSIGPPGKSSIDDSYGRYDLIQNSESPASPPVAVPHSWSRAKSDSDKISNGSSINWPPEFHPGVPWKGLQNIDPENDPDVTPGSVPTGPTINTTIQDVNRYLLKSGGKLSDIKSTWSSGPTSHTQASLSHELWKVPRNSTAPTRPPPGLTNPKPSSTWGASPLGWTSSYSSGSAWSTDTSGRTSSWLVLRNLTPQIDGSTLRTLCLQHGPLITFHLNLTQGNAVVRYSSKEEAAKAQKSLHMCVLGNTTILAEFAGEEEVNRFLAQGQALPPTSSWQSSSASSQPRLSAAGSSHGLVRSDAGHWNAPCLGGKGSSELLWGGVPQYSSSLWGPPSADDSRVIGSPTPLTTLLPGDLLSGESL

SEQ ID NO: 999 - protein, 995 aa, Homo sapiens
GSSQADPLRSRKENRNNLLACLESHGNSKMAELFMECEEEELEPWQKKVKEVEDDDDDEPIFVGEISSSKPAISNILNRVNPSSYSRGLKNGALSRGITAAFKPTSQHYTNPTSNPVPASPINFHPESRSSDSSVIVQPFSKPGYITNSSRVVSNKSSELLFDLTQDTGLSHYQGGPTLSMAGMSESSFLSKRPSTSEVNNVNPKKPKPSESVSGANSSAVLPSVKSPSVTSSQAMLAKGTNTSSNQSKNGTPFPRACPKCNIHFNLLDPLKNHMKYCCPDMINNFLGLAKTEFSSTVNKNTTIDSEKGKLIMLVNDFYYGKHEGDVQEEQKTHTTFKCFSCLKILKNNIRFMNHMKHHLELEKQSSESWENHTTCQHCYRQFPTPFQLQCHIESTHTPHEFSTICKICELSFETEHVLLQHMKDNHKPGEMPYVCQVCNYRSSSFSDVETHFRTSHENTKNLLCPFCLKVIKIATPYMHHYMKHQKKGIHRCTKCRLQFLTCKEKMDHKTQHHRTFIKPKQLEGLPPGTKVTIRASVGPLQSGASPTPSISASASTLQLSPPRTKNITAKNPAKSNTSKPNTIKSNASKPNTSKPNGSKSKYKPKISNMQKKQSTLASSNKKSKVNTALRNLRYRRGIHKCIECCSEIKDFANHFPTYVHCSFCRYNTSCSKAYVNHMMSFHSNRPSKRFCIFKKHSENLRGITLVCLNCDFLSDVSGLDNMATHLSQHKTHTCQVVMQKVSVCIPTSEHLSELKKEAPAKEQEPVSKEIARPNMAERETETSNSESKQDKAASSKEKNGCNANSFEGSSTTKSEESITVSDKENETCLADQETGSKNIVSCDSNIGADKVEKKKQIQHVCQEMELKMCQSSENIILSDQIKDHNSSEARFSSKNIKDLRLASDNVSIDQFLRKRHEPESVSSDVSEQGSIHLEPLTPSEVLEYEATEILQKGSGDPSAKTDEVVSDQTDDIPGGNNPSTTEATVDLEDEKERS

SEQ ID NO: 1000 - protein, 739 aa, Homo sapiens
SVMNFTYICKIIFQILFPKMPKRQGDFLHFLNVKKVKTDTENNEVSKNHCRLSKAKEPHFEYIEQPIIEEKPSLSSKKEIDNLVLPDCWNEKQAFMFTEQYKWLEIKEGKLGCKDCSAVRHLGSKAEKHVHVSKEWIAYLVTPNGSNKTTRQASLRKKIREHDVSKAHGKIQDLLKESTNDSICNLVHKQNNKNIDATVKVFNTVYSLVKHNRPLSDIEGARELQEKNGEVNCLNTRYSATRIAEHIAKEMKMKIFKNIIEENAKICIIIDEASTVSKKTTLVIYLQCTIQSAPAPVMLFVALKELVSTIAECIVNTLLTTLNDCGFTNEYLKANLIAFCSDGANTILGRKSGVATKLLENFPEIIIWNCLNHRLQLSLDDSISEIKQINHLKIFIDKIYSIYHQPNKNQTKLLGTVAKELETEIIKIGRVMGPRWAACSLQAATAVWHAYPILYMHFSHSYSGLAKRLANINFLQDLALMIDILEEFSVLSTALQSRSTNIKKAQKLIKRTIRALENLKIGTGKYESQIEDLIKSDKFKDIPFNKNNKFNALPRSILLDNIIQHMNLRLLSDRNHEDIFNYFDLLEPSTWPYEEITSPWIAGEKTLFHLCKILKYEVDLNDFREFVNNNIKSNNVSIPTTIYKAKKIVSTIAINSAEAERGFNLMNIICTRVRNSLTIDHVSDLMTINLLGKELADWDATPFVKSWSNCNHRLATDTRVRQKSTKVFHENQLAIWNLK

SEQ ID NO: 1001 - protein, 991 aa, Homo sapiens
RQFCAEAPTHLPSSLPDRGPVGVCSYTPTPVGRTMSLVSQNSRRRRRRVAKATAHNSSWGEMQAPNAPGLPADVPGSDVPQGPSDSQILQGLCASEGPSTSVLPTSAEGPSTFVPPTISEASSASGQPTISEGPGTSVLPTPSEGLSTSGPPTISKGLCTSVTLAASEGRNTSRPPTSSEEPSTSVPPTASEVPSTSLPPTPGEGTSTSVPPTAYEGPSTSVVPTPDEGPSTSVLPTPGEGPGTSVPLAATEGLSTSVQATPDEGPSTSVPPTATEGLSTPVPPTRDEGPSTSVPATPGEGPSTSVLPAASDGQSISLVPTRGKGSSTSVPPTATEGLSTSVQPTAGEGSSTSVPPTPGGGLSTSVPPTATEELSTSVPPTPGEGPSTSVLPIPGEGLSTSVPPTASDGSDTSVPPTPGEGASTLVQPTAPDGPGSSVLPNPGEGPSTLFSSSASVDRNPSKCSLVLPSPRVTKASVDSDSEGPKGAEGPIEFEVLRDCESPNSISIMGLNTSRVAITLKPQDPMEQNVAELLQFLLVKDQSKYPIRESEMREYIVKEYRNQFPEILRRAAAHLECIFRFELRELDPEAHTYILLNKLGPVPFEGLEESPNGPKMGLLMMILGQIFLNGNQAKEAEIWEMLWRMGVQRERRLSIFGNPKRLLSVEFVWQRYLDYRPVTDCKPVEYEFFWGPRSHLETTKMKILKFMAKIYNKDPMDWPEKYNEALEEDAARAFAEGWQALPHFRRPFFEEAAAEVPSPDSEVSSYSSKYAPHSWPESRLESKARKLVQLFLLMDSTKLPIPKKGILYYIGRECSKVFPDLLNRAARTLNHVYGTELVVLDPRNHSYTLYNRREMEETEEIVDSPNRPGNNFLMQVLSFIFIMGNHARESAVWAFLRGLGVQAGRKHVITCRYLSQRYIDSLRVPDSDPVQYEFVWGPRARLETSKMKALRYVARIHRKEPQDWPQQYREAMEDEANRADVGHRQIFVHNFR

SEQ ID NO: 1002 - protein, 690 aa, Homo sapiens
VSTIKLFLPDGMEARLRSDVIHAPLPSPVDKVAANTPSMYSQELFQLSQYLQEALHREQMLEQKLATLQRLLAITQEASDTSWQALIDEDRLLSRLEVMGNQLQACSKNQTEDSLRKELIALQEDKHNYETTAKESLRRVLQEKIEVVRKLSEVERSLSNTEDECTHLKEMNERTQEELRELANKYNGAVNEIKDLSDKLKVAEGKQEEIQQKGQAEKKELQHKIDEMEEKEQELQAKIEALQADNDFTNERLTALQEHLLSKSGGDCTFIHQFIECQKKLIVEGHLTKAVEETKLSKENQTRAKESDFSDTLSPSKEKSSDDTTDAQMDEQDLNEPLAKVSLLKDDLQGAQSEIEAKQEIQHLRKELIEAQELARTSKQKCFELQALLEEERKAYRNQVEESTKQIQVLQAQLQRLHIDTENLREEKDSEITSTRDELLSARDEILLLHQAAAKVASERDTDIASLQEELKKVRAELERWRKAASEYEKEITSLQNSFQLRCQQCEDQQREEATRLQGELEKLRKEWNALETECHSLKRENVLLSSELQRQEKELHNSQKQSLELTSDLSILQMSRKELENQVGSLKEQHLRDSADLKTLLSKAENQAKDVQKEYEKTQTVLSELKLKFEMTEQEKQSITDELKQCKNNLKLLREKGNNKPWPWMPMLAALVAVTAIVLYVPGLARASP

SEQ ID NO: 1003 - protein, 690 aa, Homo sapiens; identical to SEQ ID NO: 1002

SEQ ID NO: 1004 - protein, 1003 aa, Homo sapiens
SSGPNCAPGSSSSSSSDEAGDPNEAPSPDTLLGALARRQLNLGQLLEDTESYLQAFLAGAAGPLNGDHPGPGQSSSPDQAPPQLSKSKGLPKSAWGGGTPEAHRPGFGATSEGQGPLPFLSMFMGAGDAPLGSRPGHPHSSSQVKSKLQIGPPSPGEAQGPLLPSPARGLKFLKLPPTSEKSPSPGGPQLSPQLPRNSRIPCRNSGSDGSPSPLLARRGLGGGELSPEGAQGLPTSPSPCYTTPDSTQLRPPQSALSTTLSPGPVVSPCYENILDLSRSTFRGPSPEPPPSPLQVPTYPQLTLEVPQAPEVLRSPGVPPSPCLPESYPYGSPQEKSLDKAGSESPHPGRRTPGNSSKKPSQGSGRRPGDPGSTPLRDRLAALGKLKTGPEGALGSEKNGVPARPGTEKTRGPGKSGESAGDMVPSIHRPLEQLEAKGGIRGAVALGTNSLKQQEPGLMGDPGARVYSSHSMGARVDLEPVSPRSCLTKVELAKSRLAGALCPQVPRTPAKVPTSAPSLGKPNKSPHSSPTKLPSKSPTKVVPRPGAPLVTKESPKPDKGKGPPWADCGSTTAQSTPLVPGPTDPSQGPEGLAPHSAIEEKVMKGIEENVLRLQGQERAPGAEVKHRNTSSIASWFGLKKSKLPALNRRTEATKNKEGAGGGSPLRREVKMEARKLEAESLNISKLMAKAEDLRRALEEEKAYLSSRARPRPGGPAPGPNTGLGQVQGQLAGMYQGADTFMQQLLNRVDGKELPSKSWREPKPEYGDFQPVSSDPKSPWPACGPRNGLVGPLQGCGKPPGKPSSEPGRREETPSEDSLAEPVPTSHFTACGSLTRTLDSGIGTFPPPDHGSSGTPSKNLPKTKPPRLDPPPGVPPARPPPLTKVPRRAHTLEREVPGIEELLVSGRHPSMPAFPALLPAAPGHRGHETCPDDPCEDPGPTPPVQLAKNWTFPNTRAAGSSSDPLMCPPRQLEGLPRTPMVRIAAEERERTREQEGVMWGDQFLQ

SEQ ID NO: 1005 - protein, 1122 aa, Homo sapiens
WTEQSQEFAAQTKRLVGDVLLATAFLSYSGPFNQEFRDLLLNDWRKEMKARKIPFGKNLNLSEMLIDAPTISEWNLQGLPNDDLSIQNGIIVTKASRYPLLIDPQTQGKIWIKNKESRNELQITSLNHKYFRNHLEDSLSLGRPLLIEDVGEELDPALDNVLERNFIKTGSTFKVKVGDKEVDVLDGFRLYITTKLPNPAYTPEISARTSIIDFTVTMKGLEDQLLGRVILTEKQELEKERTHLMEDVTANKRRMKELEDNLLYRLTSTQGSLVEDESLIVVLSNTKRTAEEVTQKLEISAETEVQINSAREEYRPVATRGSILYFLITEMRLVNEMYQTSLRQFLGLFDLSLARSVKSPITSKRIANIIEHMTYEVYKYAARGLYEEHKFLFTLLLTLKIDIQRNRVKHEEFLTLIKGGASLDLKACPPKPSKWILDITWLNLVELSKLRQFSDVLDQISRNEKMWKIWFDKENPEEEPLPNAYDKSLDCFRRLLLIRSWCPDRTIAQARKYIVDSMGEKYAEGVILDLEKTWEESDPRTPLICLLSMGSDPTDSIIALGKRLKIETRYVSMGQGQEVHARKLLQQTMANGGWALLQNCHLGLDFMDELMDIIIETELVHDAFRLWMTTEVHKQFPITLLQMSIKFANDPPQGLRAGLKRTYSGVSQDLLDVSSGSQWKPMLYAVAFLHSTVQERRKFGALGWNIPYEFNQADFNATVQFIQNHLDDMDVKKGVSWTTIRYMIGEIQYGGRVTDDYDKRLLNTFAKVWFSENMFGPDFSFYQGYNIPKCSTVDNYLQYIQSLPAYDSPEVFGLHPNADITYQSKLAKDVLDTILGIQPKDTSGGGDETREAVVARLADDMLEKLPPDYVPFEVKERLQKMGPFQPMNIFLRQEIDRMQRVLSLVRSTLTELKLAIDGTIIMSENLRDALDCMFDARIPAWWKKASWVSSTLGFWFTELIERNSQFTSWVFNGRPHCFWMTGFFNPQGFLTAMRQEITRANKGWALDNMVLCNEVTKWMKDDISAPPTEGVYVYGLYLEGAGWDKRNMKLIESKPKVLFELMPVIRIYAENNTLRDPRFYSCPIYKKPVRTDLNYIAAVDLRTAQTPEHWVLRGVALLCDVK

SEQ ID NO: 1006 - protein, 937 aa, Homo sapiens
TVKEFRALGTCYLDQFEASLIYWTNWQQKMKSSVAQIKPSSGHDRRENLNSYQRNSSPEDRYEEQERSPRDRDYFDYSRSDYEHSRRGRSYDSSMESRNRDREKRRERERDTDRKRSRKSPSPGRRNPETSVTQSSSAQDEPATKKKKDELDPLLTRTGGAYIPPAKLRMMQEQITDKNSLAYQRMSWEALKKSINGLINKVNISNISIIIQELLQENIVRGRGLLSRSVLQAQSASPIFTHVYAALVAIINSKFPQIGELILKRLILNFRKGYRRNDKQLCLTASKFVAHLINQNVAHEVLCLEMLTLLLERPTDDSVEVAIGFLKECGLKLTQVSPRGINAIFERLRNILHESEIDKRVQYMIEVMFAVRKDGFKDHPIILEGLDLVEEDDQFTHMLPLEDDYNPEDVLNVFKMDPNFMENEEKYKAIKKEILDEGDTDSNTDQDAGSSEEDEEEEEEEGEEDEEGQKVTIHDKTEINLVSFRRTIYLAIQSSLDFEECAHKLLKMEFPESQTKELCNMILDCCAQQRTYEKFFGLLAGRFCMLKKEYMESFEGIFKEQYDTIHRLETNKLRNVAKMFAHLLYTDSLPWSVLECIKLSEETTTSSSRIFVKIFFQELCEYMGLPKLNARLKDETLQPFFEGLLPRDNPRNTRFAINFFTSIGLGGLTDELREHLKNTPKVIVAQKPDVEQNKSSPSSSSSASSSSESDSSDSDSDSSDSSSESSSEESDSSSISSHSSASANDVRKKGHGKTRSKEVDKLIRNQQTNDRKQKERRQEHGHQETRTERERRSEKHRDQNSSGSNWRDPITKYTSDKDVPSERNNYSRVANDRDQEMHIDLENKHGDPKKKRGERRNSFSENEKHTHRIKDSENFRRKDRSKSKEMNRKHSGSRSDEDRYQNGAERRWEKSSRYSEQSRESKKNQDRRREKSPAKQK

SEQ ID NO: 1007 - protein, 1398 aa, Homo sapiens
SPNATPRRPLQELRRAELVEIIVETEAQTGVSGINVAGGGKEGIFVRELREDSPAARSLSLQEGDQLLSARVFFENFKYEDALRLLQCAEPYKVSFCLKRTVPTGDLALRPGTVSGYEIKGPRAKVAKLNIQSLSPVKKKKMVPGALGVPADLAPVDVEFSFPKFSRLRRGLKAEAVKGPVPAAPARRRLQLPRLRVREVAEEAQAARLAAAAPPPRKAKVEAEVAAGARFTAPQVELVGPRLPGAEVGVPQVSAPKAAPSAEAAGGFALHLPTLGLGAPAPPAVEAPAVGIQVPQVELPALPSLPTLPTLPCLETREGAVSVVVPTLDVAAPTVGVDLALPGAEVEARGEAPEVALKMPRLSFPRFGARAKEVAEAKVAKVSPEARVKGPRLRMPTFGLSLLEPRPAAPEVVESKLKLPTIKMPSLGIGVSGPEVKVPKGPEVKLPKAPEVKLPKVPEAALPEVRLPEVELPKVSEMKLPKVPEMAVPEVRLPEVELPKVSEMKLPKVPEMAVPEVRLPEVQLLKVSEMKLPKVPEMAVPEVRLPEVQLPKVSEMKLPEVSEVAVPEVRLPEVQLPKVPEMKVPEMKLPKVPEMKLPEMKLPEVQLPKVPEMAVPDVHLPEVQLPKVPEMKLPEMKLPEVKLPKVPEMAVPDVHLPEVQLPKVPEMKLPKMPEMAVPEVRLPEVQLPKVSEMKLPKVPEMAVPDVHLPEVQLPKVCEMKVPDMKLPEIKLPKVPEMAVPDVHLPEVQLPKVSEIRLPEMQVPKVPDVHLPKAPEVKLPRAPEVQLKATKAEQAEGMEFGFKMPKMTMPKLGRAESPSRGKPGEAGAEVSGKLVTLPCLQPEVDGEAHVGVPSLTLPSVELDLPGALGLQGQVPAAKMGKGERAEGPEVAAGVREVGFRVPSVEIVTPQLPAVEIEEGRLEMIETKVKPSSKFSLPKFGLSGPKVAKAEAEGAGRATKLKVSKFAISLPKARVGAEAEAKGAGEAGLLPALDLSIPQLSLDAHLPSGKVEVAGADLKFKGPRFALPKFGVRGRDTEAAELVPGVAELEGKGWGWDGRVKMPKLKVSTAGQVVTEGHDAGLRMPPLGISLPQVELTGFGEAGTPGQQAQSTVPSAEGTAGYRVQVPQVTLSLPGAQVAGGELLVGEGVFKMPTVTVPQLELDVGLSREAQAGEAATGEGGLRLKLPTLGARARVGGEGAEEQPPGAERTFCLSLPDVELSPSGGNHAEYQVAEGEGEAGHKLKVRLPRFGLVRAKEGAEEGEKAKSPKLRLPRVGFSQSEMVTGEGSPSPEEEEEEEEEGSGEGASGRRGRVRVRLPRVGLAAPSKASRGQEGDAAPKSPVREKSPKFRFPRVSLSPKARSGSGDQEEGGLRVRLPSVGFSETGAPGPARMEGAQAAAV

SEQ ID NO: 1008 - protein, 1284 aa, Homo sapiens
AGPCLMASSNPPPQPAIGDQLVPGVPGPSSEAEDDPGEAFEFDDSDDEEDTSAALGVPSLAPERDTDPPLIHLDSIPVTDPDPAAAPPGTGVPAWVSNGDAADAAFSGARHSSWKRKSSRRIDRFTFPALEEDVIYDDVPCESPDAHQPGAERNLLYEDAHRAGAPRQAEDLGWSSSEFESYSEDSGEEAKPEVEVEPAKHRVSFQPKLSPDLTRLKERYARTKRDILALRVGGRDMQELKHKYDCKMTQLMKAAKSGTKDGLEKTRMAVMRKVSFLHRKDVLGDSEEEDMGLLEVSVSDIKPPAPELGPMPEGLSPQQVVRRHILGSIVQSEGSYVESLKRILQDYRNPLMEMEPKALSARKCQVVFFRVKEILHCHSMFQIALSSRVAEWDSTEKIGDLFVASFSKSMVLDVYSDYVNNFTSAMSIIKKACLTKPAFLEFLKRRQVCSPDRVTLYGLMVKPIQRFPQFILLLQDMLKNTPRGHPDRLSLQLALTELETLAEKLNEQKRLADQVAEIQQLTKSVSDRSSLNKLLTSGQRQLLLCETLTETVYGDRGQLIKSKERRVFLLNDMLVCANINFKPANHRGQLEISSLVPLGPKYVVKWNTALPQVQVVEVGQDGGTYDKDNVLIQHSGAKKASASGQAQNKVYLGPPRLFQELQDLQKDLAVVEQITLLISTLHGTYQNLNMTVAQDWCLALQRLMRVKEEEIHSANKCRLRLLLPGKPDKSGRPISFMVVFITPNPLSKISWVNRLHLAKIGLREENQPGWLCPDEDKKSKAPFWCPILACCIPAFSSRALSLQLGALVHSPVNCPLLGFSAVSTSLPQGYLWVGGGQEGAGGQVEIFSLNRPSPRTVKSFPLAAPVLCMEYIPELEEEAESRDESPTVADPSATVHPTICLGLQDGSILLYSSVDTGTQCLVSCRSPGLQPVLCLRHSPFHLLAGLQDGTLAAYPRTSGGVLWDLESPPVCLTVGPGPVRTLLSLEDAVWASCGPRVTVLEATTLQPQQSFEAHQDEAVSVTHMVKAGSGVWMAFSSGTSIRLFHTETLEHLQEINIATRTTFLLPGQKHLCVTSLLICQGLLWVGTDQGVIVLLPVPRLEGIPKITGKGMVSLNGHCGPVAFLAVATSILAPDILRSDQEEAEGPRAEEDKPDGQAHEPMPDSHVGRELTRKKGILLQYRLRSTAHLPGPLLSMREPAPADGAALEHSEEDGSIYEMADDPDVWVRSRPCARDAHRKEICSVAIISGGQGYRNFGSALGSSGRQAPCGETDSTLLIWQVPLML

SEQ ID NO: 1009 - protein, 1329 aa, Homo sapiens
ECSRVTVTEHWSKVFPKGQGSQEHLLKLMTMGDMKTPDFDDLLAAFDIPDMVDPKAAIESGHDDHESHMKQNAHGEDDSHAPSSSDVGVSVIVKNVRNIDSSEGGEKDGHNPTGNGLHNGFLTASSLDSYSKDGAKSLKGDVPASEVTLKDSTFSQFSPISSAEEFDDDEKIEVDDPPDKEDMRSSFRSNVLTGSAPQQDYDKLKALGGENSSKTGLSTSGNVEKNKAVKRETEASSINLSVYEPFKVRKAEDKLKESSDKVLENRVLDGKLSSEKNDTSLPSVAPSKTKSSSKLSSCIAAIAALSAKKAASDSCKEPVANSRESSPLPKEVNDSPRAADKSPESQNLIDGTKKPSLKQPDSPRSISSENSSKGSPSSPAGSTPAIPKVRIKTIKTSSGEIKRTVTRVLPEVDLDSGKKPSEQTASVMASVTSLLSSPASAAVLSSPPRAPLQSAVVTNAVSPAELTPKQVTIKPVATAFLPVSAVKTAGSQVINLKLANNTTVKATVISAASVQSASSAIIKAANAIQQQTVVVPASSLANAKLVPKTVHLANLNLLPQGAQATSELRQVLTKPQQQIKQAIINAAASQPPKKVSRVQVVSSLQSSVVEAFNKVLSSVNPVPVYIPNLSPPANAGITLPTRGYKCLECGDSFALEKSLTQHYDRRSVRIEVTCNHCTKNLVFYNKCSLLSHARGHKEKGVVMQCSHLILKPVPADQMIVSPSSNTSTSTSTLQSPVGAGTHTVTKIQSGITGTVISAPSSTPITPAMPLDEDPSKLCRHSLKCLECNEVFQDETSLATHFQQAADTSGQKTCTICQMLLPNQCSYASHQRIHQHKSPYTCPECGAICRSVHFQTHVTKNCLHYTRRVGFRCVHCNVVYSDVAALKSHIQGSHCEVFYKCPICPMAFKSAPSTHSHAYTQHPGIKIGEPKIIYKCSMCDTVFTLQTLLYRHFDQHIENQKVSVFKCPDCSLLYAQKQLMMDHIKSMHGTLKSIEGPPNLGINLPLSIKPATQNSANQNKEDTKSMNGKEKLEKKSPSPVKKSMETKKVASPGWTCWECDCLFMQRDVYISHVRKEHGKQMKKHPCRQCDKSFSSSHSLCRHNRIKHKGIRKVYACSHCPDSRRTFTKRLMLEKHVQLMHGIKDPDLKEMTDATNEEETEIKEDTKVPSPKRKLEEPVLEFRPPRGAITQPLKKLKINVFKVHKCAVCGFTTENLLQFHEHIPQHKSDGSSYQCRECGLCYTSHVSLSRHLFIVHKLKEPQPVSKQNGAGEDNQQENKPSHEDESPDGAVSDRKCKVCAKTFETEAALNTHMRTHGMAFIKSKRMSSAEK

SEQ ID NO: 1010 - protein, 1457 aa, Homo sapiens
KTNGDGAAEGSMAEAVKPQRRAKAKASRTKTKEKKKYETPQREESSEVSLPKTSREQEIPSLACEFKGDHLKVVTDSQLQDDASGQNESEMFDVPLTSLTISNEESLTCNTEPPKEGGEARPCVGDSAVTPKVHPGDNVGTKVETPKNFTEVEENMSVQGGLSESAPQSNFSYTQPAMENIQVRETQNSKEDEQGLVCSSEVPQNVGLQSSCPAKHGFQTPRVKKLYPQLPAEIAGEAPALVAVKPLLRSERLYPELPSQLELVPFTKEQLKILEPGSWLENVESYLEEFDSMAHQDRHEFYELLLNYSRCRKQLLLAEAELLTLTSDCQNAKSRLWQFKEEQMSVQGICADQVKVFSYHRYQRVEMNENALVELKKLFDAKSEHLHQTLALHSYTSVLSRLQVESYIYALLSSSAVLRSSAIHQQGRASKQTESIPSDLCQLKECISVLFMFTRRVNEDTQFHDDILLWLQKLVSVLQRVGCPGDHLFLLNHILRCPAGVSKWAVPFIQIKVLHNPSGVFHFMQSLALLMSPVKNRAEFMCHMKPSERKPSSSGPGSGTWTLVDEGGEEDEDPETSWILLNEDDLVTILAQFPFHELFQHLLGFKAKGDYLPETTRPQEMMKIFAFANSLVELLAVGLETFNRARYRQFVKRIGYMIRMTLGYVSDHWAQYVSHNQGSGLAQQPYSMEKLQVEFDELFLRAVLHVLKAKRLGIWLFMSEMPFGTLSVQMLWKLFYLMHQVESENLQQLSSSLQPAQCKQQLQDPEHFTNFEKCLSSMNSSEEICLLTTFAQMAQARRTNVDEDFIKIIVLEIYEVSYVTLSTRETFSKVGRELLGTITAVHPEIISVLLDRVQETIDQVGMVSLYLFKELPLYLWQPSASEIAVIRDWLLNYNLTVVKNKLACVILEGLNWGFAKQATLHLDQAVHAEVALMVLEAYQKYLAQKPYAGILSESMKQVSYLASIVRYGETPETSFNQWAWNLILRLKLHKNDYGIQPNCPAVPFSVTVPDMTESPTFHPLLKAVKAGMPIGCYLALSMTAVGHSIEKFCAEGIPLLGILVQSRHLRTVVHVLDKILPLFYPCQYYLLKNEQFLSHLLLFLHLDSGVPQGVTQQVTHKVAQHLTGASHGDNVKLLNSMIQAHISVSTQPNEVGPVAVLEFWVQALISQHLWYREQPILFLMDHLCKAAFQLMQEDCIQKLLYQQHKNALGYHCDRSLLSSLVSWIVAGNITPSFVEGLATPTQVWFAWTVLNMESIFEEDSQLRRVIEGELVINSAFTPDQALKKAQTQLKLPIVPSLQRLLIYRWAHQALVTPSDHPLLPLIWQKFFLLYLHRPGPQYGLPIDGCIGRRFFQSPAHINLLKEMKRRLTEVADFHHAASKALRVPAEGSEGLPESHSGTPGYLTSPELHKELVRLFNVYILWLEDENFQKGDTYIPSLPKHYDIHRLAKVMQNQQVKL

SEQ ID NO: 1011 - protein, 1457 aa, Homo sapiens; identical to SEQ ID NO: 1010

SEQ ID NO: 1012 - protein, 1435 aa, Homo sapiens
FPIPLDESSSHECNQRTILLYGVGKERDEARHQLKKITKDILKILNKKSTTETGVGDEGQKARKNKQETFPTLETVFTKLQLLSYFDQHQVTSQISNNVLEQITSFASGTSYHLPLAHHIQLIFDLMEPALNINGLIDFAIQLLNELSVVEAELLLKSSSLAGSYTTGLCVCIVAVLRRYHSCLILNPDQTAQVFEGLCGVVKHVVNPSECSSPERCILAYLYDLYVSCSHLRSKFGDLFSSACSKVKQTIYNNVMPANSNLRWDPDFMMDFIENPSARSINYSMLGKILSDNAANRYSFVCNTLMNVCMGHQDAGRINDIANFSSELTACCTVLSSEWLGVLKALCCSSNHVWGFNDVLCTVDVSDLSFHDSLATFIAILIARQCFSLEDVVQHVALPSLLAAACGDADAEPGARMTCRLLLHLFRAPQACFLPQATGKPFPGIRSSCDRHLLAAAHNSIEVGAVFAVLKAIMMLGDAKIGNNSVSSLKNDDFTMRGLRCDGNADDIWTASQNPKSCGKSISIETANLREYARYVLRTICQQEWVGEHCLKEPERLCTDKELILDPVLSNMQAQKLLQLICYPHGIKECTEGDNLQRQHIKRILQNLEQWTLRQSWLELQLMIKQCLKDPGSGSVAEMNNLLDNIAKATIEVFQQSADLNNSSNSGMSLFNPNSIGSADTSSTRQNGIKTFLSSSERRGVWLVAPLIARLPTSVQGRVLKAAGEELEKGQHLGSSSKKERDRQKQKSMSLLSQQPFLSLVLTCLKGQDEQREGLLTSLQNQVNQILSNWREERYQDDIKARQMMHEALQLRLNLVGGMFDTVQRSTQWTTDWALLLLQIITSGTVDMHTNNELFTTVLDMLGVLINGTLASDLSNASPGGSEENKRAYMNLVKKLKKELGDKRSESIDKVRQLLPLPKQTCDVITCEPMGSLIDTKGNKIAGFDSIDKKQGLQVSTKQKVSPWDLFEGQKNPAPLSWAWFGTVRVDRRVIKYEEQHHLLLYHTHPMPKPRSYYLQPLPLPPEEEEEEPTSPVSQEPERKSAELSDQGKTTTDEEKKTKGRKRKTKSSSRVDEYPQSNIYRVPPNYSPISSQMMHHPQSTLWGYNLVGQPQQPGFFLQNQSLTPGGSRLDPAGSFVPTNTKQALSNMLQRRSGAMMQPPSLHAITSQQQLIQMKLLQQQQQQRLLRQAQTRPFQQGQPGDQAALFAAQARPSPQLPQYPGLQQAQTMPQGYTMYGTQMPLQQTSQQQAGSVVLSPSYNSRAYPAAHSNPVLMERLRQIQQQPSGYVQQQASPYLQPLTGSQRLNHQALQQSPLVGGGIDAVLTSAHPNLPSVPLPQDPMRPRQPQVRQQQRLLQMQQPQQPQPQQPPQPQQSSQSQSQTLGLQAMQPQQPLFPRQGLQQTQQQQQTAALVRQLQKQLSSNQPQQGVTPYGHPSHF

SEQ ID NO: 1013 - protein, 1997 aa, Homo sapiens
RLFVPREGCGIWDIDKAWGELEKAEHEREAALRAELIRQEKLELLAQRFDHKVAMRESWLNENQRLVSQDNFGYELPAVEAAMKKHEAIEADIAAYEERVQGVAELAQALAAEGYYDIRRVAAQRDSVLRQWALLTGLVGARRTRLEQNLALQKVFQEMVYMVDWMEEMQAQLLSRECGQHLVEADDLLQKHGLLEGDIAAQSERVEALNAAALRFSQLQGYQPCDPQVICNRVNHVHGCLAELQEQAARRRAELEASRSLWALLQELEEAESWARDKERLLEAAGGGGAAGAAGAAGTAGGAHDLSSTARLLAQHKILQGELGGRRALLQQALRCGEELVAAGGAVGPGADTVHLVGLAERAASARRRWQRLEEAAARRERRLQEARALHQFGADLDGLLDWLRDAYRLAAAGDFGHDEASSRRLARQHRALTGEVEAHRGPVSGLRRQLATLGGASGAGPLVVALQVRVVEAEQLFAEVTEVAALRRQWLRDALAVYRMFGEVHACELWIGEKEQWLLSMRVPDSLDDVEVVQHRFESLDQEMNSLMGRVLDVNHTVQELVEGGHPSSDEVRSCQDHLNSRWNRIVELVEQRKEEMSAVLLVENHVLEVAEVRAQVREKRRAVESAPRAGGALQWRLSGLEAALQALEPRQAALLEEAALLAERFPAQAARLHQGAEELGAEWGALASAAQACGEAVAAAGRLQRFLHDLDAFLDWLVRAQEAAGGSEGPLPNSLEEADALLARHAALKEEVDQREEDYARIVAASEALLAADGAELGPGLALDEWLPHLELGWHKLLGLWEARREALVQAHIYQLFLRDLRQALVVLRNQEMALSGAELPGTVESVEEALKQHRDFLTTMELSQQKMQVAVQAAEGLLRQGNIYGEQAQEAVTRLLEKNQENQLRAQQWMQKLHDQLELQHFLRDCHELDGWIHEKMLMARDGTREDNHKLHKRWLRHQAFMAELAQNKEWLEKIEREGQQLMQEKPELAASVRKKLGEIRQCWAELESTTQAKARQLFEASKADQLVQSFAELDKKLLHMESQLQDVDPGGDLATVNSQLKKLQSMESQVEEWYREVGELQAQTAALPLEPASKELVGERQNAVGERLVRLLEPLQERRRLLLASKELHQVAHDLDDELAWVQERLPLAMQTERGNGLQAVQQHIKKNQGLRREIQAHGPRLEEVLERAGALASLRSPEAEAVRRGLEQLQSAWAGLREAAERRQQVLDAAFQVEQYYFDVAEVEAWLGEQELLMMSEDKGKDEQSTLQLLKKHLQLEQGVENYEESIAQLSRQCRALLEMGHPDSEQISRRQSQVDRLYVALKELGEERRVALEQQYWLYQLSRQVSELEHWIAEKEVVAGSPELGQDFEHVSVLQEKFSEFASETGMAGRERLAAVNQMVDELIECGHTAAATMAEWKDGLNEAWAELLELMGTRAQLLAASRELHKFFSDARELQGQIEEKRRRLPRLTTPPEPRPSASSMQRTLRAFEHDLQLLVSQVRQLQEGAAQLRTVYAGEHAEAIASREQEVLQGWKELLSACEDARLHVSSTADALRFHSQVRDLLSWMDGIASQIGAADKPRDVSSVEVLMNYHQGLKTELEARVPELTTCQELGRSLLLNKSAMADEIQAQLDKLGTRKEEVSEKWDRHWEWLQQMLEVHQFAQEAVVADAWLTAQEPLLQSRELGSSVDEVEQLIRRHEAFRKAAAAWEERFSSLRRLTTIEKIKAEQSKQPPTPLLGRKFFGDPTELAAKAAPLLRPGGYERGLEPLARRASDTLSAEVRTRVGYVRQELKPERLQPRIDRLPEIPGRVEPAALPAAPEDAAETPATPAAAEQVRPRPERQESADRAEELPRRRRPERQESVDQSEEAARRRRPERQESAEHEAAHSLTLGRYEQMERRRERRERRLERQESSEQEMPIRGDLVKGKATLADIVEQLQEKEAGPGLPAGPSLPQPRELPPGRLPNGLELPERTPRPDRPRARDRPKPRR

SEQ ID NO: 1014 - protein, 362 aa, Homo sapiens [sequence omitted]

SEQ ID NO: 1015 - protein, 731 aa, Homo sapiens
MASCPDSDNSWVLAGSESLPVETLGPASRMDPESERALQAPHSPSKTDGKELAGTMDGEGTLFQTESPQSGSILTEETEVKGTLEGDVCGVEPPGPGDTVVQGDLQETTVVTGLGPDTQDLEGQSPPQSLPSTPKAAWIREEGRCSSSDDDTDVDMEGLRRRRGREAGPPQPMVPLAVENQAGGEGAGGELGISLNMCLLGALVLLGLGVLLFSGGLSESETGPMEEVERQVLPDPEVLEAVGDRQDGLREQLQAPVPPDSVPSLQNMGLLLDKLAKENQDIRLLQAQLQAQKEELQSLMHQPKGLEEENAQLRGALQQGEAFQRALESELQQLRARLQGLEADCVRGPDGVCLSGDRGPQGDKAIREQGPREQEPELSFLKQKEQLEAEAQALRQELERQRRLLGSVQQDLERSLQDASRGDPAHAGLAELGHRLAQKLQGLENWGQDPGVSANASKAWHQKSHFQNSREWSGKEKWWDGQRDRKAEHWKHKKEESGRERKKNWGGQEDREPAGRWKEGRPRVEESGSKKEGKRQGPKEPPRKSGSFHSSGEKQKQPRWREGTKDSHDPLPSWAELLRPKYRAPQGCSGVDECPRQEGLTFFGTELAPVRQQELASLLRTYLARLPWAGQLTKELPLSPAFFGEDGIFRHDRLRFRDFVDALEDSLEEVAVQQTGDDDEVDDFEDFIFSHFFGDKALKKRSGKKDKHSQSPRAAGPREGHSHSHHHHHRG

SEQ ID NO: 1016 - protein, 145 aa, Homo sapiens
MELVQVLKRGLQQITGHGGLRGYLRVFFRTNDAKVGTLVGEDKYGNKYYEDNKQFFGRHRWVVYTTEMNGKNTFWDVDGSMVPPEWHRWLHSMTDDPPTTKPLTARKFIWTNHKFNVTGTPEQYVPYSTTRKKIQEWIPPSTPYK

SEQ ID NO: 1017 - protein, 145 aa, Homo sapiens; identical to SEQ ID NO: 1016

SEQ ID NO: 1018 - protein, 302 aa, Homo sapiens
SSSSTASASAKKIIVKHVTVIGGGLMGAGIAQVAAATGHTVVLVDQTEDILAKSKKGIEESLRKVAKKKFAENPKAGDEFVEKTLSTIATSTDAASVVHSTDLVVEAIVENLKVKNELFKRLDKFAAEHTIFASNTSSLQITSIANATTRQDRFAGLHFFNPVPVMKLVEVIKTPMTSQKTFESLVDFSKALGKHPVSCKDTPGFIVNRLLVPYLMEAIRLYERGDASKEDIDTAMKLGAGYPMGPFELLDYVGLDTTKFIVDGWHEMDAENPLHQPSPSLNKLVAENKFGKKTGEGFYKYK

SEQ ID NO: 1019 - protein, 28 aa, Homo sapiens
GEFGVYLVSDGSSRPYRCKIKAPGFAHL

SEQ ID NO: 1020 - protein, 264 aa, Homo sapiens [sequence omitted]

SEQ ID NO: 1021 - protein, 117 aa, Homo sapiens
MKFQYKEDHPFEYRKKEGEKIRKKYPDRVPVIVEKAPKARVPDLDKRKYLVPSDLTVGQFYFLIRKRIHLRPEDALFFFVNNTIPPTSATMGQLYEDNHEEDYFLYVAYSDESVYGK

SEQ ID NO: 1022 - protein, 568 aa, Homo sapiens
MPSTDLLMLKAFEPYLEILEVYSTKAKNYVNGHCTKYEPWQLIAWSVVWTLLIVWGYEFVFQPESLWSRFKKKCFKLTRKMPIIGRKIQDKLNKTKDDISKNMSFLKVDKEYVKALPSQGLSSSAVLEKLKEYSSMDAFWQEGRASGTVYSGEEKLTELLVKAYGDFAWSNPLHPDIFPGLRKIEAEIVRIACSLFNGGPDSCGCVTSGGTESILMACKAYRDLAFEKGIKTPEIVAPQSAHAAFNKAASYFGMKIVRVPLTKMMEVDVRAMRRAISRNTAMLVCSTPQFPHGVIDPVPEVAKLAVKYKIPLHVDACLGGFLIVFMEKAGYPLEHPFDFRVKGVTSISADTHKYGYAPKGSSLVLYSDKKYRNYQFFVDTDWQGGIYASPTIAGSRPGGISAAAWAALMHFGENGYVEATKQIIKTARFLKSELENIKGIFVFGNPQLSVIALGSRDFDIYRLSNLMTAKGWNLNQLQFPPSIHFCITLLHARKRVAIQFLKDIRESVTQIMKNPKAKTTGMGAIYGMAQTTVDRNMVAELSSVFLDSLYSTDTVTQGSQMNGSPKPH

SEQ ID NO: 1023 - protein, 748 aa, Homo sapiens [sequence omitted]

SEQ ID NO: 1024 - protein, 183 aa, Homo sapiens
RNQTSISQWVPVCSRLIPVSPTQGQGDRALSRTSQWPQMSQSRACGGSEQIPGIDIQLNRKYHTTRKLSTTKDSPQPVEEKVGAFTKIIEAMGFTGPLKYSKWKIKIAALRMYTSCVEKTDFEEFFLRCQMPDTFNSWFLITLLHVWMCLVRMKQEGRSGKYMCRIIVHFMWEDVQQRGRVMG

SEQ ID NO: 1025 - protein, 768 aa, Homo sapiens
ASGSGSSGDSLDKSITLPPDEIFRNLENAKRFAIDIGGSLTKLAYYSTVQHKVAKVRSFDHSGKDTEREHEPPYEISVQEEITARLHFIKFENTYIEACLDFIKDHLVNTETKVIQATGGGAYKFKDLIEEKLRLKVDKEDVMTCLIKGCNFVLKNIPHEAFVYQKDSDPEFRFQTNHPHIFPYLLVNIGSGVSIVKVETEDRFEWVGGSSIGGGTFWGLGALLTKTKKFDELLHLASRGQHSNVDMLVRDVYGGAHQTLGLSGNLIASSFGKSATADQEFSKEDMAKSLLHMISNDIGQLACLHARLHSLDRVYFGGFFIRGHPVTMRTITYSINFFSKGEVQALFLRHEGYLGAIGAFLKGAEQDNPNQYSWGENYAGSSGLMSASPELGPAQRARSGTFDLLEMDRLERPLVDLPLLLDPPSYVPDTVDLTDDALARKYWLTCFEEALDGVVKRAVASQPDSVDAAERAEKFRQKYWNKLQTLRQQPFAYGTLTVRSLLDTREHCLNEFNFPDPYSKVKQRENGVALRCFPGVVRSLDVLGWEERQLALVKGLLAGNVFDWGAKAVSAVLESDPYFGFEEAKRKLQERPWLVDSYSEWLQRLKGPPHKCALIFADNSGIDIILGVFPFVRELLLRGTEVILACNSGPALNDVTHSESLIVAERIAGMDPVVHSALQEERLLLVQTGSSSPCLDLSRLDKGLAALVRERGADLVVIEGMGRAVHTNYHAALRCESLKLAVIKNAWLAERLGGRLFSVIFKYEVPAE

SEQ ID NO: 1026 - protein, 163 aa, Homo sapiens
MTGDKGPQRLSGSSYGSISSPTSPTSPGPQQAPPRETYLSEKIPIPDTKPGTFSLRKLWAFTGPGFLMSIAFLDPGNIESDLQAGAVAGFKLLWVLLWATVLGLLCQRLAARLGVVTGKDLGEVCHLYYPKSESRSVAQSGVQWCDVSSLQPLPPRCPAPSSG

SEQ ID NO: 1027 - protein, 744 aa, Homo sapiens [sequence omitted]

SEQ ID NO: 1028 - protein, 229 aa, Homo sapiens
KVIHMFSTAEGLLTQGDKITADGLQEVFETDVFGHFILIRELEPLLCHSDNPSQLIWTSSRNARKSNFSLEDFQHSKGKEPYSSSKYATDLLSVALNRNFQPAGSLFQCGLSRYSIDQFDIWNSASVYMDTVDAGNILRFFANAFTLTPYNGTEALVWLFHQKPESVNPLIKYLSATTGFGRNYIMTQKMDLDEDTAEKFYQKLLELEKHIRVTIQKTDNQARLSGSCL

SEQ ID NO: 1029 - protein, 114 aa, Homo sapiens
ESGLGKLTLINSLFLTDLYSPEYPGPSQRIKKPVQMEQSKVLIKEGGVQLLLTIVDTPGFGDAVDNSNCWQPAINYIDSKFEDYLNAESRVNRCQMPGNRVQCCLYFIAPSGHG

SEQ ID NO: 1030 - protein, 373 aa, Homo sapiens
ESVTFQDVAVDFTAEEWQLLDCAERTLYWDVMLENYRNLISVGCPITKTKVILKVEQGQEPWMVEGANPHESSPESDYPLVDEPGKHRESKDNFLKSVLLTFNKILTMERIHHYNMSTSLNPMRKKSYKSFEKCLPPNLDLLKYNRSYTVENAYECSECGKAFKKKFHFIRHEKNHTRKKPFECNDCGKAYSRKAHLATHQKIHNGERPFVCNDCGKAFMHKAQLVVHQRLHTGEKPYECSQCGKTFTWNSSFNQHVKSHTLEKSFECKECGKTFRYSSSLYKHSRFHTGEKPYQCIICGKAFGNTSVLVTHQRIHTGEKPYSCIECGKAFIKKSHLLRHQITHTGEKPYECNRCGKAFSQKSNLIVHQKIHT

SEQ ID NO: 1031 - protein, 260 aa, Homo sapiens
MASSGMTRRDPLANKVALVTASTDGIGFAIARRLAQDGAHVVVSSRKQQNVDQAVATLQGEGLSVTGTVCHVGKAEDRERLVAMAVKLHGGIDILVSNAAVNPFFGSLMDVTEEVWDKTLDINVKAPALMTKAVVPEMEKRGGGSVVIVSSIAAFSPSPGFSPYNVSKTALLGLTKTLAIELAPRNIRVNCLAPGLIKTSFSRMLWMDKEKEESMKETLRIRRLGEPEDCAGIVSFLCSEDASYITGETVVVGGGTPSRL

SEQ ID NO: 1032 - protein, 421 aa, Homo sapiens [sequence omitted]

SEQ ID NO: 1033 - protein, 345 aa, Homo sapiens
MNLEGTNLDKLPMASTITKIPSPLITEEGPNLPEIRHRGRFAVEFNKMQDLVFKKPTRQTIMTTETLKKIQIDRQFFSDVIADTIKELQDSATYNSLLQALSKERENKMHFYDIIAREEKGRKQIISLQKQLINVKKEWQFEVQSQNEYIANLKDQLQEMKAKSNLENRYMKTNTELQIAQTQKKCNRTEELLVEEIEKLRMKTEEEARTHTEIEMFLRKEQQKLEERLEFWMEKYDKDTEMKQNELNALKATKASDLAHLQDLAKMIREYEQVIIEDRIEKERSKKKVKQDLLELKSVIKLQAWWRGTMIRREIGGFKMPKDKVDSKDSKGKGKGKDKRRGKKK

SEQ ID NO: 1034 - protein, 501 aa, Homo sapiens
MKEMSANTVLDSQRQQKHYGITSPISLASPKEIDHIYTQKLIDAMKPFGVFEDEEELNHRLVVLGKLNNLVKEWISDVSESKNLPPSVVATVGGKIFTFGSYRLGVHTKGADIDALCVAPRHVERSDFFQSFFEKLKHQDGIRNLRAVEDAFVPVIKFEFDGIEIDLVFARLAIQTISDNLDLRDDSRLRSLDIRCIRSLNGCRVTDEILHLVPNKETFRLTLRAVKLWAKRRGIYSNMLGFLGGVSWAMLVARTCQLYPNAAASTLVHKFFLVFSKWEWPNPVLLKQPEESNLNLPVWDPRVNPSDRYHLMPIITPAYPQQNSTYNVSTSTRTVMVEEFKQGLAVTDEILQGKSDWSKLLEPPNFFQKYRHYIVLTASASTEENHLEWVGLVESKIRVLVGNLERNEFITLAHVNPQSFPGNKEHHKDNNYVSMWFLGIIFRRVENAESVNIDLTYDIQSFTDTVYRQANNINMLKEGMKIEATHVKKKQLHHYLPAEIL

SEQ ID NO: 1035 - protein, 602 aa, Homo sapiens [sequence omitted]

SEQ ID NO: 1036 - protein, 409 aa, Homo sapiens [sequence omitted]

SEQ ID NO: 1037 - protein, 486 aa, Homo sapiens [sequence omitted]

SEQ ID NO: 1038 - protein, 806 aa, Homo sapiens [sequence omitted]

SEQ ID NO: 1039 - protein, 730 aa, Homo sapiens
MGLGKTIQSITFLYEILLTGIRGPFLIIAPLSTIANWEREFRTWTDINVVVYHGSLISRQMIQQYEMYFRDSQGRIIRGAYRFQAIITTFEMILGGCGELNAIEWRCVIIDEAHRLKNKNCKLLEGLKLMNLEHKVLLTGTPLQNTVEELFSLLHFLEPLRFPSESTFMQEFGDLKTEEQVQKLQVILKPMMLRRLKEDVEKKLAPKEETIIEVELTNIQKKYYRAILEKNFSFLSKGAGQTNVPNLVNTMMELRKCCNHPYLIKGAEEKILGEFRDTYNPAASDFHLQAMIQSAGKLVLIDKLLPKMKAGGHKVLIFSQMVRCLDILEDYLIHKRYLYERIDGRVRGNLRQAAIDRFSKPDSDRFVFLLCTRAGGLGINLTAADTCIIFDSDWNPQNDLQAQARCHRIGQNKAVKVYRLVTRNSYEREMFDRASLKLGLDKAVLQSMSGRESNVGGIQQLSKKEIEDLLRRGAYGAIMEEEDEGSKFCEEDIDQILLRRTKTITIESEGRGSTFAKASFVASGNRTDISLDDPNFWQKWAKKAEIDIEAISGRNGLVIDTPRIRKQTRPFSATKDELAELSEAESEGDEKPKLRRPCDRSNGYGRTECFRVEKNLLVYGWGRWREILSHGRFKRQLNEHDVEIICRALLAYCLVHYRGDEKIKGFIWDLITPTEDGQTRELQNHLGLSAPVPRGRKGKKVKTQTSSFDIQKAEWLRKYNPEQLLQDEGY

SEQ ID NO: 1040 - protein, 664 aa, Homo sapiens
MQLISIAPENLQHDIITSLPEILGDSQHADVGKELSDLLIENTSLTVPILDVLSSLRLDPDFLLKVRQLVMDKLSSIRLEDLPVIIKFILHSVTAMDTLEVISELREKLDLQHCVLPSRLQASQVKLKSKGRASSSGNQESSGQSCIILLFDVIKSAIRYEKTISEAWIKAIENTASVSEHKVFDLVMLFIIYSTNTQTKKYIDRVLRNKIRSGCIQEQLLQSTFSVHYLVLKDMCSSILSLAQSLLHSLDQSIISFGSLLYKYAFKFFDTYCQQEVVGALVTHICSGNEAEVDTALDVLLELVVLNPSAMMMNAVFVKGILDYLDNISPQQIRKLFYVLSTLAFSKQNEASSHIQDDMHSVIRKQLSSTVFKYKLIGIIGAVTMAGIMAADGSESPSLTQERANLSDEQCTQVTSLLQLVHSCSEQSPQASALYYDEFANLIQHEKLDPKALEWVGHTICNDFQDAFVVDSCVVPEGDFPFPVKALYGLEEYDTQDGIAINLLPLLFSQDFAKDGGPVTSQESGQKLVSPLCLAPYFRLLRLCVERQHNGNLEEIDGLLDCPIFLTDLEPGEKLESMSAKERSFMCSLIFLTLNWFREIVNAFCQETSPEMKGKVLTRLKHIVELQIILEKYLAVTPDYVPPLGNFDVETLDITPHTVTAISA

SEQ ID NO: 1041 - protein, 705 aa, Homo sapiens
MDRQSVLHVLGILKNSKFLKVCLPAYVVGMITEPIPDIRNQYPEHISNIISLLQDLVSVFPASSVQETSMLVSLLPTSLNALRASGVDIEEETEKNLEKVQTIIEHLQEKRREGTLRVDTYTLVQPEAEDHVESYRTMPIYPTYNEVHLDERPFLRPNIISGKYDSTAIYLDTHFRLLREDFVRPLREGILELLQSFEDQGLRKRKFDDIRIYFDTRIITPMCSSSGIVYKVQFDTKPLKFVRWQNSKRLLYGSLVCMSKDNFETFLFATVSNREQEDLCRGIVQLCFNEQSQQLLAEVQPSDSFLMVETTAYFEAYRHVLEGLQEVQEEDVPFQRNIVECNSHVKEPRYLLMGGRYDFTPLIENPSATGEFLRNVEGLRHPRINVLDPGQWPSKEALKLDDSQMEALQFALTRELAIIQGPPGTGKTYVGLKIVQALLTNESVWQISLQKFPILVVCYTNHALDQFLEGIYNCQKTSIVRVGGRSNSEILKQFTLRELRNKREFRRNLPMHLRRAYMSIMTQMKESEQELHEGAKTLECTMRGVLREQYLQKYISPQHWESLMNGPVQDSEWICFQHWKHSMMLEWLGLGVGSFTQSVSPAGPENTAQAEGDEEEEGEEESSLIEIAEEADLIQADRVIEEEEVVRPQRRKKEESGADQELAKMLLAMRLDHCGTGTAAGQEQATGEWQTVPCLVLMSADPAQP

SEQ ID NO: 1042 - protein, 213 aa, Homo sapiens [sequence omitted]

SEQ ID NO: 1043 - protein, 236 aa, Homo sapiens
MKDQHLRGFFSDSTSFNILMDMLFIKGKYKSALQVLIEMKNLDVKFTKDTYVLAFAICYKLNSPESFKICTTLREEALLKGEILSRRASCFAVALALNQNEMAKAVSIFSQIMNPESIACINLNIIIHIQSNMLENLIKTLKNAAEGNLSKFVKRHVFSEEVLAKVREKVKDVPALVAKFDEIYGTLHITGQVTTDSLDAVLCHTPRDRKSHTLLLNKRMVSRRTFQPLSQSLLAE

SEQ ID NO: 1044 - protein, 938 aa, Homo sapiens
MHRYLPRLHLVPAEKAVEVIQLNGPGVHTFTFPQTEFFAVTAYQNIQITQLKIDYNPFAKGFRDDGLNNNPQRDGKQKNSSDQEGNNISSSSGHRVRLTEGQGSEIQPGDLDPLSRGHETSGKGLEKTSLNIKRDFLGFMDTDSALSEVPQLKQEISECLIASSFEDDSRVASPLDQNGSFNVVIKEEPLDDYDYELGECPEGVTVKQEETDEETDVYSNSDDDPILEKQLKRHNKVDNPEADHLSSKWLPSSPSGVAKAKMFKLDTGKMPVVYLEPCAVTRSTVKISELPDNMLSTSRKDKSSMLAELEYLPTYIENSNETAFCLGKESENGLRKHSPDLRVVQKYPLLKEPQWKYPDISDSISTERILDDSKDSVGDSLSGKEDLGRKRTTMLKIATAAKVVNANQNASPNVPGKRGRPRKLKLCKAGRPPKNTGKSLISTKNTPVSPGSTFPDVKPDLEDVDGVLFVSFESKEALDIHAVDGTTEESSSLQASTTNDSGYRARISQLEKELIEDLKSLRHKQVIHPGLQEVGLKLNSVDPTMRIDLKYLGVQLPLAPATSFPFWNLTGTNPASPDAGFPFVSRTGKTNDFTKIKGWRGKFHSASASRNEGGNSESSLKNRSAFCSDKLDEYLENEGKLMETSMGFSSNAPTSPVVYQLPTKSTSYVRTLDSVLKKQSTISPSTSYSLKPHSVPPVSRKAKSQNRQATFSGRTKSSYKSILPYPVSPKQKYSHVILGDKVTKNSSGIISENQANNFVVPTLDENIFPKQISLRQAQQQQQQQQGSRPPGLSKSQVKLMDLEDCALWEGKPRTYITEERADVSLTTLLTAQASLKTKPIHTIIRKRAPPCNNDFCRLGCVCSSLALEKRQPAHCRRPDCMFGCTCLKRKVVLVKGGSKTKHFQRKAAHRDPVFYDTLGEEAREEEEGIREEEEQLKE

SEQ ID NO: 1045 - protein, 255 aa, Homo sapiens
MELLVARTQMISVSRAFAGKLKFLRVKTVPLLSKVDDIHAICSLLKDFLRNLKEPLLTFRLNRAFMEAAEITDEDNSIAAMYQAVGELPQANRDTLAFLMIHLQRVAQSPHTKMDVANLAKVFGPTIVAHAVPNPDPVTMLQDIKRQPKVVERLLSLPLEYWSQFMMVEQENIDPLHVIENSNAFSTPQTPDIKVSLLGPVTTPEHQLLKTPSSSSLSQRVRSTLTKNTPRFGSKSKSATNLGRQGNFFASPMLK

SEQ ID NO: 1046 - protein, 846 aa, Homo sapiens
MKAVPGTEVPGHKNWVVSKFGRVLPVLHLKNQHKRKIIKYDPSKYCHNLKKIGEDFSNTIPISSLTWELEGGNDPMSKKRRGEFSDFHGPPKKIIKVQKDESSTGSLAMSTRPRRVIERPPLTQQQAAQKRTCDSITPSKSSPVPVSDTQKLKNLPFKTSGLETAKKRNSISDDDTDSEDELRMMIAKEENLQRTTQPSINESESDPFEVVRDDFKSGVHKLHSLIGLGIKNRVSCHDSDDDIMRNDREYDSGDTDEIIAMKKNVAKVKNSTEFSQMEKSTKKTSFKNRENCELSDHCIKLQKRKSNVESALSHGLKSLNRKSPSHSSSSEDADSASELADSEGGEEYNAMMKNCLRVNLTLADLEQLAGSDLKVPNEDTKSDGPETTTQCKFDRGSKSPKTPTGLRRGRQCIRPAEIVASLLEGEENTCGKQKPKENNLKPKFQAFKGVGCLYEKESMKKSLKDSVASNNKDQNSMKHEDPSIISMEDGSPYVNGSLGEVTPCQHAKKANGPNYIQPQKRQTTFESQDRKAVSPSSSEKRSKNPISRPLEGKKSLSLSAKTHNIGFDKDSCHSTTKTEASQEERSDSSGLTSLKKSPKVSSKDTREIKTDFSLSISNSSDVSAKDKHAEDNEKRLAALEARQKAKEVQKKLVHNALANLDGHPEDKPTHIIFGSDSECETEETSTQEQSHPGEEWVKESMGKTSGKLFDSSDDDESDSEDDSNRFKIKPQFEGRAGQKLMDLQSHFGTDDRFRMDSRFLETDSEEEQEEVNEKKTAEEEELAEEKKKALNVVQSVLQINLSNSTNRGSVAAKKFKDIIHYDPTKQDHATYERKRDDKPKESKAKR

SEQ ID NO: 1047 - protein, 785 aa, Homo sapiens
MADLDSPPKLSGVQQPSEGVGGGRCSEISAELIRSLTELQELEAVYERLCGEEKVVERELDALLEQQNTIESKMVTLHRMGPNLQLIEGDAKQLAGMITFTCNLAENVSSKVRQLDLAKNRLYQAIQRADDILDLKFCMDGVQTALRSEDYEQAAAHIHRYLCLDKSVIELSRQGKGGSMIDANLKLLQEAEQRLKAIVAEKFAIATKEGDLPQVERFFKIFPLLGLHEEGLRRFSEYLCKQVASKAEENLLMVLGTDMSDRRAAVIFADTLTLLFEGIARIVEAHQPIVETYYGPGRLYTLIKYLQVECDRQVEKVVDKFIKQRDYHQQFRHVQNNLMRNSTTEKIEPRELDPILTEVTLMNARSELYLRFLKKRISSDFEVGDSMASEEVKQEHQKCLDKLLNNCLLSCTMQELIGLYVTMEEYFMRETVNKAVALDTYEKGQLTSSMVDDVFYIVKKCIGRALSSSSIDCLCAMINLATTELESDFRDVLCNKLRMGFPATTFQDIQRGVTSAVNIMHSSLQQGKFDTKGIESTDEAKMSFLVTLNNVEVCSENISTLKKTLESDCTKLFSQGIGGEQAQAKFDGCLSDLAAVSNKFRDLLQEGLTELNSTAIKPQVQPWINSFFSVSHNIEEEEFNDYEANDPWVQQFILNLEQQMAEFKASLSPVIYDSLTGLMTSLVAVELEKVVLKSTFNRLGGLQFDKELRSLIAYLTTVTTWTIRDKFARLSQMATILNLERVTEILDYWGPNSGPLTWRLTPAEVRQVLALRIDFRSEDIKRLRL

SEQ ID NO: 1048 - protein, 401 aa, Homo sapiens [sequence omitted]

SEQ ID NO: 1049 - protein, 803 aa, Homo sapiens
MNMFKEAVTFKDVAVAFTEEELGLLGPAQRKLYRDVMVENFRNLLSVGHPPFKQDVSPIERNEQLWIMTTATRRQGNLGEKNQSKLITVQDRESEEELSCWQIWQQIANDLTRCQDSMINNSQCHKQGDFPYQVGTELSIQISEDENYIVNKADGPNNTGNPEFPILRTQDSWRKTFLTESQRLNRDQQISIKNKLCQCKKGVDPIGWISHHDGHRVHKSEKSYRPNDYEKDNMKILTFDHNSMIHTGQKSYQCNECKKPFSDLSSFDLHQQLQSGEKSLTCVERGKGFCYSPVLPVHQKVHVGEKLKCDECGKEFSQGAHLQTHQKVHVIEKPYKCKQCGKGFSRRSALNVHCKVHTAEKPYNCEECGRAFSQASHLQDHQRLHTGEKPFKCDACGKSFSRNSHLQSHQRVHTGEKPYKCEECGKGFICSSNLYIHQRVHTGEKPYKCEECGKGFSRPSSLQAHQGVHTGEKSYICTVCGKGFTLSSNLQAHQRVHTGEKPYKCNECGKSFRRNSHYQVHLVVHTGEKPYKCEICGKGFSQSSYLQIHQKAHSIEKPFKCEECGQGFNQSSRLQIHQLIHTGEKPYKCEECGKGFSRRADLKIHCRIHTGEKPYNCEECGKVFRQASNLLAHQRVHSGEKPFKCEECGKSFGRSAHLQAHQKVHTGDKPYKCDECGKGFKWSLNLDMHQRVHTGEKPYKCGECGKYFSQASSLQLHQSVHTGEKPYKCDVCGKVFSRSSQLQSHQRVHTGEKPYKCEICGKSFSWRSNLTVHHRIHVGDKSYKSNRGGKNIRESTQEKKSIK

SEQ ID NO: 1050 - protein, 502 aa, Homo sapiens
MKTDSIQNRTARALGNLAMEPESCGDIHCAGAVPLLVESLTACQDSQCLQSVVRALRNLADSPQHRLALAQQGAVRPLAELLATAPDAALTLALVRALLELSRGCSRACAEQLSLGGGLGPLVSLASHPKRAVREGTILILANLCAQGLIRPALGNAGGVEVLVDELRQRRDPNGASPTSQQPLVRAVCLLCREAINRARLRDAGGLDLLMGLLRDPRASAWHPRIVAALVGFLYDTGALGRLQALGLVPLLAGQLCGEAGEEEEEGREAASWDFPEERTPERAQGGSFRSLRSWLISEGYATGPDDISPDWSPEQCPPEPMEPASPAPTPTSLRAPRTQRTPGRSPAAAIEEPWGREGPALLLLSRFSQAPDPSGALVTGPALYGLLTYVTGAPGPPSPRALRILSRLTCNPACLEAFVRSYGAALLRAWLVLGVAPDDWPAPRARPTLHSRHRELGERLLQNLTVQAESPFGVGALTHLLLSGSPEDRVACALTLPFICR

SEQ ID NO: 1051 - protein, 476 aa, Homo sapiens
MEGSASEVLKEWTVTGKKKNKKKKNKPKPAAEPSNGIPDSSKSVSIQEEQSAPSSEKGGMNGYHVNGAINDTESVDSLSEGLETLSIDARELEDPESAMLDTLDRTGSMLQNGVSDFETKSLTMHSIHNSQQPRNAAKSLSRPTTETQFSNMGMEDVPLATSKKLSSNIEKSVKDLQRCTVSLARYRVVVKEEMDASIKKMKQAFAELESCLMDREVALLAEMDKVKAEAMEILLSRQKKAELLKKMTHVAVQMSEQQLVELRADIKHFVSERKYDEDLGRVARFTCDVETLKKSIDSFGQVSHPKNSYSTRSRCSSVTSVSLSSPSDASAASSSTCASPPSLTSANKKNFAPGETPAAIANSSGQPYQPLREVLPGNRRGGQGYRPQGQKSNDPMNQGRHDSMGRYRNSSWYSSGSRYQSAPSQAPGNTIERGQTHSAGTNGTGVSMEPSPPTPSFKKGLPQRKPRTSQTEAVNS

SEQ ID NO: 1052 - protein, 533 aa, Homo sapiens
MSGTLESLADDVSSMGSDSEINGLALRKTDKYGFLGGSQYSGSLESSIPVDVARQRELKWLDMFSNWDKWLSRRFQKVKLRCRKGIPSSLRAKAWQYLSNSKELLEQNPGKFEELERAPGDPKWLDVIEKDLHRQFPFHEMFAARGGHGQQDLYRILKAYTIYRPDEGYCQAQAPVAAVLLMHMPAEQAFWCLVQICDKYLPGYYSAGLEAIQLDGEIFFALLRRASPLAHRHLRRQRIDPVLYMTEWFMCIFARTLPWASVLRVWDMFFCEGVKIIFRVALVLLRHTLGSVEKLRSCQGMYETMEQLRNLPQQCMQEDFLVHEVTNLPVTEALIERENAAQLKKWRETRGELQYRPSRRLHGSRAIHEERRRQQPPLGPSSSLLSLPGLKSRGSRAAGGAPSPPPPVRRASAGPAPGPVVTAEGLHPSLPSPTGNSTPLGSSKETRKQEKERQKQEKERQKQEKEREKERQKQEKEREKQEKEREKQEKERQKQEKKAQGRKLSLRRKADGPPGPHDGGDRPSAEARQDAYF

SEQ ID NO: 1053 - protein, 413 aa, Homo sapiens
MAITAAHGASTAVQTGDPASKDQVTTPWVPSSALIVSSNARTSPRAVLWSMAPGGAAPCPRLPAVKTGCTAVCDLIQSKCLSKENATTDLLTKLPAHTVGDVKCDMEVSCPDGYTCCRLQSGAWGCCPFTQAVCCEDHIHCCPAGFTCDTQKGTCEQGPHQVPWMEKAPAHLSLPDPQALKRDVPCDNVSSCPSSDTCCQLTSGEWGCCPIPEAVCCSDHQHCCPQGYTCVAEGQCQRGSEIVAGLEKMPARRASLSHPRDIGCDQHTSCPVGQTCCPSLGGSWACCQLPHAVCCEDRQHCCPAGYTCNVKARSCEKEVVSAQPATFLARSPHVGVKDVECGEGHFCHDNQTCCRDNRQGWACCPYRQGVCCADRRHCCPAGFRCAARGTKCLRREAPRWDAPLRDPALRQLL

SEQ ID NO: 1054 - protein, 639 aa, Homo sapiens [sequence omitted]

SEQ ID NO: 1055 - protein, 1081 aa, Homo sapiens
MPLEQESRMEVLSACAEALHAHGYSSEASRLTVELAQDLLANPPDLKVEPPPAKGKKNKVSTSRQTWVATNTLSKAAFLLTVLSERPEHHNLAFRVGMFALELQRPPASTKALEVKLAYQESEVAALLKKIPLGPSEMSTMRCRAEELREGTLCDYRPVLPLMLASFIFDVLCAPVVSPTGSRPPSRNWNSETPGDEELGFEAAVAALGMKTTVSEAEHPLLCEGTRREKGDLALALMITYKDDQAKLKKILDKLLDRESQTHKPQTLSSFYSSSRPTTASQRSPSKHGGPSAPGTLQPLTSGSAGPAQPGSVAGAGPGPTEGFTEKNVPESSPHSPCEGLPSEAALTPRPEGKVPSRLALGSRGGYNGRGWGSPGRPKMKHTGMASIDSSAPETTSDSSPTLSRRPLQGGWAPTSWGRGQDSDSISNSSSDSLGSSSSSGSRRASASGGARAKTVEVGRYKGRRPESHAPHVPNQPSEAAAHFYFELAKTVLIKTGGNSSTSIFTHPSSSGGHQGPHRNLHLCAFEIGLYALGLHNFVSPNWLSRTYSSHVSWITGQAMEIGSAALTILVECWDGHLTPPEVASLADRASRARDSNMVRAAAELALSCLPHAHALNPNEIQRALVQCKEQDNLMLEKACMAVEVAAKGGGVYPEVLFEVAHQWFWLYEQTAGGSSTAREGATSCSASGIRAGGEAGRGMPEGRGGPGTEPVTVAAAAVTAAATVVPVISVGSSLYPGPGLGHGHSPGLHPYTALQPHLPCSPQYLTHPAHPAHPMPHMPRPAVFPVPSSAYPQGVHPAFLGAQYPYSVTPPSLAATAVSFPVPSMAPITVHPYHTEPGLPLPTSVACELWGQGTVSSVHPASTFPAIQGASLPALTTQPSPLVSGGFPPPEEETHSQPVNPHSLHHLHAAYRVGMLALEMLGRRAHNDHPNNFSRSPPYTDDVKWLLGLAAKLGVNYVHQFCVGAAKGVLSPFVLQEIVMETLQRLSPAHAHNHLRAPAFHQLVQRCQQAYMQYIHHSLIHLTPADYDDFVNAIRSARSAFCLTPMGMMQFNDILQNLKRSKQTKELWQRVSLEMATFSP

SEQ ID NO: 1056 - protein, 774 aa, Homo sapiens [sequence omitted]

SEQ ID NO: 1057 - protein, 807 aa, Homo sapiens
MLFIPSRQTVPTYKKLPENVQPRFLEDEGLYTGVRPEVARTNQNIMENRLLMQDPERRWFGDDGRILALPNPIKPFPSRPPVLTQEQSIKAELETLYKKAVKYVHSSQHVIRSGDPPGNFQLDIDISGLIFTHHPCFSREHVLAAKLAQLYDQYLARHQRNKAKFLTDKLQALRNAVQTGLDPEKPHQSLDTIQKTINEYKSEIRQTRKFRDAEQEKDRTLLKTIIKVWKEMKSLREFQRFTNTPLKLVLRKEKADQKADEEAYEAEIQAEISELLEEHTEEYAQKMEEYRTSLQQWKAWRKVQRAKKKKRKQAAEEHPGDEIAEPYPEEDLVKPSPPEPTDRAVIEQEVRERAAQSRRRPWEPTLVPELSLAGSVTPNDQCPRAEVSRREDVKKRSVYLKVLFNNKEVSRTVSRPLGADFRVHFGQIFNLQIVNWPESLTLQVYETVGHSSPTLLAEVFLPIPETTVVTGRAPTEEVEFSSNQHVTLDHEGVGSGVPFSFEADGSNQLTLMTSGKVSHSVAWAIGENGIPLIPPLSQQNIGFRSALKKADAISSIGTSGLTDMKKLAKWAAESKLDPNDPNNAPLMQLISVATSGESYVPDFFRLEQLQQEFNFVSDQELNRSKRFRLLHLRSQEVPEFRNYKQVPVYDREIMEKVFQDYEKRLRDRNVIETKEHIDTHRAIVAKYLQQVRESVMDWRPRHLTRWNRYCTSTLRHFLPLLEKSQGEDVEDDHRAELLKQLGDYRFSGFPLHMPYSEVKPLIDAVYSTGVHNIDVPNVEFALAVYIHPYPKNVLSVWIYVASLIRNR

SEQ ID NO: 1058 - protein, 705 aa, Homo sapiens [sequence omitted]

SEQ ID NO: 1059 - protein, 621 aa, Homo sapiens
MSGCGLFLRTTAAARACRGLVVSTANRRLLRTSPPVRAFAKELFLGKIKKKEVFPFPEVSQDELNEINQFLGPVEKFFTEEVDSRKIDQEGKIPDETLEKLKSLGLFGLQVPEEYGGLGFSNTMYSRLGEIISMDGSITVTLAAHQAIGLKGIILAGTEEQKAKYLPKLASGEHIAAFCLTEPASGSDAASIRSRATLSEDKKHYILNGSKVWITNGGLANIFTVFAKTEVVDSDGSVKDKITAFIVERDFGGVTNGKPEDKLGIRGSNTCEVHFENTKIPVENILGEVGDGFKVAMNILNSGRFSMGSVVAGLLKRLIEMTAEYACTRKQFNKRLSEFGLIQEKFALMAQKAYVMESMTYLTAGMLDQPGFPDCSIEAAMVKVFSSEAAWQCVSEALQILGGLGYTRDYPYERILRDTRILLIFEGTNEILRMYIALTGLQHAGRILTTRIHELKQAKVSTVMDTVGRRLRDSLGRTVDLGLTGNHGVVHPSLADSANKFEENTYCFGRTVETLLLRFGKTIMEEQLVLKRVANILINLYGMTAVLSRASRSIRIGLRNHDHEVLLANTFCVEAYLQNLFSLSQLDKYAPENLDEQIKKVSQQILEKRAYICAHPLDRTC

SEQ ID NO: 1060 - protein, 247 aa, Homo sapiens [sequence omitted]

SEQ ID NO: 1061 - protein, 332 aa, Homo sapiens [sequence omitted]

SEQ ID NO: 1062 - protein, 429 aa, Homo sapiens [sequence omitted]

SEQ ID NO: 1063 - protein, 239 aa, Homo sapiens [sequence omitted]

SEQ ID NO: 1064 - protein, 239 aa, Homo sapiens [sequence omitted]

SEQ ID NO: 1065 - protein, 248 aa, Homo sapiens [sequence omitted]

SEQ ID NO: 1066 - protein, 366 aa, Homo sapiens [sequence omitted]

SEQ ID NO: 1067 - protein, 696 aa, Homo sapiens
MENTFKCSDKADTSSLIINNKLICNETVEVPKDSKSKICSERKRVNENELQQDEPPAKKGSIHVSSAITEDQKKSEEVRPSIAEIEDIRVLQENNEGLRAFLLTIENELKNEKEEKAELNKQIVHSQQELSLSEKKNLTLSKEVQQIQSNYDIAIAELHVQKSKNQEQEEKIMKLSNEIETATRSITNNVSQIKLMHTKIDELRTLDSVSQISNIDLLNLRDLSNGSEEDNLPNTQLDLLGNDYLVSKQVKEYRIQEPNRENSFHSSIEAIWEECKEIVKASSKKSHQIEELEQQIEKLQAEVKGYKDENNRLKEREHKNQDDLLKEKETLIQQLKEELQEKNVTLDVQIQHVVEGKRALSELTQGVTCYKAKIKELETILETQKVERSHSAKLEQDILEKESIILKLERNLKEFQEHLQDSVKNTKDLNVKELKLKEEITQLTNNLQDMKHLLQLKEEEEETNRQETEKLKEELSASSARTQNLKADLQRKEEDYADLKEKLTDAKKQIKQVQKEVSVMRDEDKLLRIKINELEKKKNQCSQELDMKQRTIQQLKEQLNNQKVEEAIQQYERACKDLNVKEKIIEDMRMTLEEQEQTQVEQDQVLEAKLEEVERLATELEKWKEKCNDLETKNNQRSNKEHENNTDVLGKLTNLQDELQESEQKYNADRKKWLEEKMMLITQAKEAENIRKKKKK

SEQ ID NO: 1068 - protein, 1148 aa, Homo sapiens [sequence omitted]

SEQ ID NO: 1069 - protein, 868 aa, Homo sapiens [sequence omitted]

SEQ ID NO: 1070 - protein, 746 aa, Homo sapiens
MGLKVIQQNVRKFLQLRFWGWWKLYNKVKPLLNVARQEEEMKAKEEELRKAMAQTQELVNKVKELEEKTATLSQEKNDLTIQLQAEQENLMDAEERLTWMMKTKMDLESQISDMRERLEEEEGMAASLSAAKRKLEGELSDLKRDLEGLETTLAKTEKEKQALDHKVRTLTGDLSLREDSITKLQKEKRALEELHQKTLDDLQAEEDKVNHLTKNNSKLSTQIHELEDNWEQEKKIRAEVEKARRKAESDLKMTIDNLNEMERSKLDLEEVVKKRDLEINSVNSKYEDEQSLNSTLQRKLKEHQDRIEELEEELEAERAMRAKIEQNRKREAELLKLRRELEEAALQSEATASTLRKKHVDSMAELTEHVESLQRVKSKLEKDKQVMKAEIDDLNASMETIQKSKMNAEAHVRKLEDSLSEANAKVAELERNQAEINAIRTRLQAENSELSREYEESQSRLNQILRIKTSLTSQVDDYKRQLDEESKSRSTAVVSLANTKHDLDLVKEQLEEEQGGKSELQRLVSKLNTEVTTWRTKYETDAIQRTEELEETKRKLAARLQEAEEAAETAQARAASLEKNKQRLQAEVEDLTIDLEKANAAAAALDKKQRLFDKMLAEWQQKCEELQVEVDSSQKECRMYMTESFKIKTAYEESLEHLESVKKENKTLQEEIKDLIDQLGEGGRSVHELQKLKKKLEMEKEELQVALEEAESSLEVEESKVIRIQLELAQVKADIDRRIHEKKKKK

SEQ ID NO: 1071 - protein, 570 aa, Homo sapiens [sequence omitted]

SEQ ID NO: 1072 - protein, 669 aa, Homo sapiens [sequence omitted]

SEQ ID NO: 1073 - protein, 328 aa, Homo sapiens
MAAVVVAAAGGAGPAVLQVAGLYRGLCAVRSRALGLGLVSPAQLRVFPVRPGSGRPEGGADGSGVGAEAELQANPFYDRYRDKIQLLRRSDPAAFESRLEKRSEFRKQPVGHSRQGDFIKCVEQKTDALGKQSVNRGFTKDKTLSSIFNIEMVKEKTAEEIKQIWQQYFAAKDTVYAVIPAEKFDLIWNRAQSCPTFLCALPRREGYEFFVGQWTGTELHFTALINIQTRGEAAASQLILYHYPELKEEKGIVLMTAEMDSTFLNVAEAQCIANQVQLFYATDRKETYGLVETFNLRPNEFKYMSVIAELEQSGLGAELKCAQNQNKT

SEQ ID NO: 1074 - protein, 384 aa, Homo sapiens
MNYPSSLALLRELSLSPPAALWLQERQAQLRHSLPLQSFLLKPVQRILKYHLLLQELGKHWAEGPGTGGREMVEEAIVSMTAVAWYINDMKRKQEHAARLQEVQRRLGGWTGPELSAFGELVLEGAFRGGGGGGPRLRGGERLLFLFSRMLLVAKRRGLEYTYKGHIFCCNLSVSESPRDPLGFKVSDLTIPKHRHLLQAKNQEEKRLWIHCLQRLFFENHPASIPAKAKQVLLENSLHCAPKSKPVLEPLTPPLGSPRPRDARSFTPGRRNTAPSPGPSVIRRGRRQSEPVKDPYVMFPQNAKPGFKHAGSEGELYPPESQPPVSGSAPPEDLEDAGPPTLDPSGTSITEEILELLNQRGLRDPGESMGLHRAQGAPDAPFHM

SEQ ID NO: 1075 - protein, 194 aa, Homo sapiens
MQAVRNAGSRFLRSWTWPQTAGRVVARTPAGTICTGARQLQDAAAKQKVEQYAAPSHTKFSIYPPIPGEESSLRWAGKKFEEIPIAHIKASHNNTQIQVVSASNEPLAFASCGTEGFRNAKKGTGIAAQTAGIAAAARAKQKGVIHIRVVVKGLGPGRLSAMHGLIMGGLEVISITDNTPIPHNGCRPRKARKL

SEQ ID NO: 1076 - protein, 181 aa, Homo sapiens [sequence omitted]

SEQ ID NO: 1077 - protein, 310 aa, Homo sapiens [sequence omitted]

SEQ ID NO: 1078 - protein, 509 aa, Homo sapiens [sequence omitted]

SEQ ID NO: 1079 - protein, 121 aa, Homo sapiens [sequence omitted]

SEQ ID NO: 1080 - protein, 412 aa, Homo sapiens
MVLFSDSSLPHWQQQPPQPAPPPPLFPRQQQVQVNKGRVNCHPRCRYIKTKPCHQLSHQVWVQQKPSHRLLSLQLSPSPKPSPSPQLSLKFRLSLKFRPKQLFHPMSLLKHNPPTHSHPSPKLQSQSQPQSNVQGQSPVRVQSPSQTRIRPSTPSQLSPGQQSQVQTTTSQPIPIQPHTSLQIPSQGQPQSQPQVVMKHNAVIEHLKQKKSMTPAEREENQRMIVCNQVMKYILDKIDKEEKQAAKKRKREESVEQKRSKQNATKLSALLFKHKEQLRAEILKKRALLDKDLQIEVQEELKRDLKIKKEKDLMQLAQATAVAAPCPPVTPAPPAPPAPPAPPPSPPPPPAVQHTGLLSTPTLPAASQKRKREEEKDSSSKSKKKKMISTTSKETKKDTKLYCICKTPYDESK

SEQ ID NO: 1081 - protein, 217 aa, Homo sapiens
LGGRSPPCPRLGAPPPLPCRARPGGVVGGGPGGGPAWAAPAMNGLSLSELCCLFCCPPCPGRIAAKLAFLPPEATYSLVPEPEPGPGGAGAAPLGTLRASSGAPGRWKLHLTERADFQYSQRELDTIEVFPTKSARGNRVSCMYVRCVPGARYTVLFSHGNAVDLGQMSSFYIGLGSRLHCNIFSYDYSGYGASSGRPSERNLYADIDAAWQALRTR

SEQ ID NO: 1082 - protein, 75 aa, Homo sapiens
TMSALLLTVNFGLSVGRYWETVERLKINQFYGAPTAVRLLLKYGDAWVKKYDRSSLRTLGSGERPALQQERLCLP

SEQ ID NO: 1083 - protein, 1430 aa, Homo sapiens
EPEVHAPESGLRTSLGTASGSRRSRAASSRGWRLPGRTLLGRSAMPEGAQGLSLSKPSPSLGCGRRGEVCDCGTVCETRTAPAAPTMASPRGSGSSTSLSTVGSEGDPAPGPTPACSASRPEPLPGPPIRLHLSPVGIPGSARPSRLERVAREIVETERAYVRDLRSIVEDYLGPLLDGGVLGLSVEQVGTLFANIEDIYEFSSELLEDLENSSSAGGIAECFVQRSEDFDIYTLYCMNYPSSLALLRELSLSPPAALWLQERQAQLRHSLPLQSFLLKPVQRILKYHLLLQELGKHWAEGPGTGGREMVEEAIVSMTAVAWYINDMKRKQEHAARLQEVQRRLGGWTGPELSAFGELVLEGAFRGGGGGGPRLRGGERLLFLFSRMLLVAKRRGLEYTYKGHIFCCNLSVSESPRDPLGFKVSDLTIPKHRHLLQAKNQEEKRLWIHCLQRLFFENHPASIPAKAKQVLLENSLHCAPKSKPVLEPLTPPLGSPRPRDARSFTPGRRNTAPSPGPSVIRRGRRQSEPVKDPYVMFPQNAKPGFKHAGSEGELYPPESQPPVSGSAPPEDLEDAGPPTLDPSGTSITEEILELLNQRGLRDPGPSTHDIPKFPGDSQVPGDSETLTFQALPSRDSSEEEEEEEEGLEMDERGPSPLHVLEGLESSIAAEMPSIPCLTKIPDVPNLPEIPSRCEIPEGSRLPSLSDISDVFEMPCLPAIPSVPNTPSLSSTPTLSCDSWLQGPLQEPAEAPATRRELFSGSNPGKLGEPPSGGKAGPEEDEEGVSFTDFQPQDVTQHQGFPDELAFRSCSEIRSAWQALEQGQLARPGFPEPLLILEDSDLGGDSGSGKAGAPSSERTASRVRELARLYSERIQQMQRAETRASANAPRRRPRVLAQPQPSPCLPQEQAEPGLLPAFGHVLVCELAFPLTCAQESVPLGPAVWVQAAIPLSKQGGSPDGQGLHVSNLPKQDLPGIHVSAATLLPEQGGSRHVQAPAATPLPKQEGPLHLQVPALTTFSDQGHPEIQVPATTPLPEHKSHMVIPAPSTAFCPEQGHCADIHVPTTPALPKEICSDFTVSVTTPVPKQEGHLDSESPTNIPLTKQGGSRDVQGPDPVCSQPIQPLSWHGSSLDPQGPGDTLPPLPCHLPDLQIPGTSPLPAHGSHLDHRIPANAPLSLSQELPDTQVPATTPLPLPQVLTDIWVQALPTSPKQGSLPDIQGPAAAPPLPEPSLTDTQVQKLTPSLEQKSLIDAHVPAATPLPERGGSLDIQGLSPTPVQTTMVLSKPGGSLASHVARLESSDLTPPHSPPPSSRQLLGPNAAALSRYLAASYISQSLARRQGPGGGAPAASRGSWSSAPTSRASSPPPQPQPPPPAARRLSYATTVNIHVGGGGRLRPAKAQVRLNHPALLASTQESMGLHRAQGAPDAPFHM

SEQ ID NO: 1084 - protein, 249 aa, Homo sapiens [sequence omitted]

SEQ ID NO: 1085 - protein, 1343 aa, Homo sapiens
LRLSPPLLTNPAPARPAPRRGRSRSPSGGVTMEEEDESRGKTEESGEDRGDGPPDRDPTLSPSAFILRAIQQAVGSSLQGDLPNDKDGSRCHGLRWRRCRSPRSEPRSQESGGTDTATVLDMATDSFLAGLVSVLDPPDTWVPSRLDLRPGESEDMLELVAEVRIGDRDPIPLPVPSLLPRLRAWRTGKTVSPQSNSSRPTCARHLTLGTGDGGPAPPPAPSSASSSPSPSPSSSSPSPPPPPPPPAPPAPPAPRFDIYDPFHPTDEAYSPPPAPEQKYDPFEPTGSNPSSSAGTPSPEEEEEEEEEEEEEEEDEEEEEGLSQSISRISETLAGIYDDNSLSQDFPGDESPRPDAQPTQPTPAPGTPPQVDSTRADGAMRRRVFVVGTEAEACREGKVSVEVVTAGGAALPPPLLPPGDSEIEEGEIVQPEEEPRLALSLFRPGGRAARPPPAASATPTAQPLPQPPAPRAPEGDDFLSLHAESDGEGALQVDLGEPAPAPPAADSRWGGLDLRRKILTQRRERYRQRSPSPAPAPAPAAAAGPPTRKKSRRERKRSGEAKEAASSSSGTQPAPPAPASPWDSKKHRSRDRKPGSHASSSARRRSRSRSRSRSTRRRSRSTDRRRGGSRRSRSREKRRRRRRSASPPPATSSSSSSRRERHRGKHRDGGGSKKKKKRSRSRGEKRSGDGSEKAPAPAPPPSGSTSCGDRDSRRRGAVPPSIQDLTDHDLFAIKRTITVGRLDKSDPRGPSPAPASSPKREVLYDSEGLSGEERGGKSSQKDRRRSGAASSSSSSREKGSRRKALDGGDRDRDRDRDRDRDRSSKKARPPKESAPSSGPPPKPPVSSGSGSSSSSSSCSSRKVKLQSKVAVLIREGVSSTTPAKDAASAGLGSIGVKFSRDRESRSPFLKPDERAPTEMAKAAPGSTKPKKTKVKAKAGAKKTKGTKGKTKPSKTRKKVRSGGGSGGSGGQVSLKKSKADSCSQAAGTKGAEETSWSGEERAAKVPSTPPPKAAPPPPALTPDSQTVDSSCKTPEVSFLPEEATEEAGVRGGAEEEEEEEEEEEEEEEEEEQQPATTTATSTAAAAPSTAPSAGSTAGDSGAEDGPASRVSQLPTLPPPMPWNLPAGVDCTTSGVLALTALLFKMEEANLASRAKAQELIQATNQILSHRKPPSSLGMTPAPVPTSLGLPPGPSSYLLPGSLPLGGCGSTPPTPTGLAATSDKREGSSSSEGRGDTDKYLKKLHTQERAVEEVKLAIKPYYQKKDITKEEYKDILRKAVHKICHSKSGEINPVKVSNLVRAYVQRYRYFRKHGRKPGDPPGPPRPPKEPGPPDKGGPGLPLPPL

SEQ ID NO: 1086 - protein, 641 aa, Homo sapiens
GARRALGVLGQPGGLQMRLPERHGGPQGSLCLMDPCCPLSLALQDLVERDCNGDTPNLSFYRNEIRFLPNGCFIEDILQNWTDNYDLLEDNHSYIQWLFPLREPGVNWHAKPLTLREVEVFKSSQEIQERLVRAYELMLGFYGIRLEDRGTGTVGRAQNYQKRFQNLNWRSHNNLRITRILKSLGELGLEHFQAPLVRFFLEETLVRRELPGVRQSALDYFMFAVRCRHQRRQLVHFAWEHFRPRCKFVWGPQDKLRRFKPSSLPHPLEGSRKVEEEGSPGDPDHEASTQGRTCGPEHSKGGGRVDEGPQPRSVEPQDAGPLERSQGDEAGGHGEDRPEPLSPKESKKRKLELSRREQPPTEPGPQSASEVEKIALNLEGCALSQGSLRTGTQEVGGQDPGEAVQPCRQPLGARVADKVRKRRKVDEGAGDSAAVASGGAQTLALAGSPAPSGHPKAGHSENGVEEDTEGRTGPKEGTPGSPSETPGPSPAGPAGDEPAESPSETPGPRPAGPAGDEPAESPSETPGPRPAGPAGDEPAKTPSETPGPSPAGPTRDEPAESPSETPGPRPAGPAGDEPAESPSETPGPRPAGPAGDEPAESPSETPGPSPAGPTRDEPAKAGEAAELQDAEVESSAKSGKP

SEQ ID NO: 1087 - protein, 237 aa, Homo sapiens
MGPCTTAWFHSDWSSKCSAECGTGIQRRSVVCLGSGAALGPGQGEAGAGTGQSCPTGSRPPDMRACSLGPCERTWRWYTGPWGECSSECGSGTQRRDIICVSKLGTEFNVTSPSNCSHLPRPPALQPCQGQACQDRWFSTPWSPCSRSCQGGTQTREVQCLSTNQTLSTRCPPQLRPSRKRPCNSQPCSQRPDDQCKDSSPHCPLVVQARLCVYPYYTATCCRSCAHVLERSPQDPS

SEQ ID NO: 1088 - protein, 272 aa, Homo sapiens
MSVGFIGAGQLAFALAKGFTAAGVLAAHKIMASSPDMDLATVSALRKMGVKLTPHNKETVQHSDVLFLAVKPHIIPFILDEIGADIEDRHIVVSCAAGVTISSIEKKLSAFRPAPRVIRCMTNTPVVVREGATVYATGTHAQVEDGRLMEQLLSSVGFCTEVEEDLIDAVTGLSGSGPAYAFTALDALADGGVKMGLPRRLAVRLGAQALLGACQDAAALRTAPRPAQGQRQLSWWGHHPCLACAGEWGLPLPAHQRCGGLLHPHTGAAVHG

SEQ ID NO: 1089 - protein, 324 aa, Homo sapiens
MRFTFPLMAIVLEIAMIVLFGLFVEYETDQTVLEQLNITKPTDMGIFFELYPLFQDVHVMIFVGFGFLMTFLKKYGFSSVGINLLVAALGLQWGTIVQGILQSQGQKFNIGIKNMINADFSAATVLISFGAVLGKTSPTQMLIMTILEIVFFAHNEYLVSEIFKASDIGASMTIHAFGAYFGLAVAGILYRSGLRKGHENEESAYYSDLFAMIGTLFLWMFWPSFNSAIAEPGDKQCRAIVNTYFSLAACVLTAFAFSSLVEHRGKLNMVHIQNATLAGGVAVGTCADMAIHPFGSMIIGSIAGMVSVLGYKFLTPLFTTKLRI

SEQ ID NO: 1090 - protein, 278 aa, Homo sapiens
MFFFSRLEYLKELPVDKLKGVSLIKVKFEDIKDWSDLVTPQGIMGIFAKPDHVKMTYPKTQLQHSLPLLLICDNLRDPGNLGTILRSAAGAGCSKVLLTKGCVDAWEPKVLRAGMGAHFRMPIINNLEWETVPNYLPPDTRVYVADNCGLYAQAEMSNKASDHGWVCDQRVMKFHKYEEEEDVETGASQDWLPHVEVQSYDSDWTEAPAAVVIGGETYGVSLESLQLAESTGGKRLLIPVVPGVDSLNSAMAASILLFEGKRQLRGRAEDLSRDRSYH

SEQ ID NO: 1091 - protein, 370 aa, Homo sapiens
MAVSVTPIRDTKWLTLEVCREFQRGTCSRPDTECKFAHPSKSCQVENGRVIACFDSLKGRCSRENCKYLHPPPHLKTQLEINGRNNLIQQKNMAMLAQQMQLANAMMPGAPLQPVPMFSVAPSLATNASAAAFNPYLGPVSPSLVPAEILPTAPMLVTGNPGVPVPAAAAAAAQKLMRTDRLEVCREYQRGNCNRGENDCRFAHPADSTMIDTNDNTVTVCMDYIKGRCSREKCKYFHPPAHLQAKIKAAQYQVNQAAAAQAAATAAAMGIPQAVLPPLPKRPALEKTNGATAVFNTGIFQYQQALANMQLQQHTAFLPPVPMVHGATPATVSAATTSATSVPFAATATANQIPIISAEHLTSHKYVTQM

SEQ ID NO: 1092 - protein, 1056 aa, Homo sapiens
MEVAEVESPLNPSCKIMTFRPSMEEFREFNKYLAYMESKGAHRAGLAKVIPPKEWKPRQCYDDIDNLLIPAPIQQMVTGQSGLFTQYNIQKKAMTVKEFRQLANSGKYCTPRYLDYEDLERKYWKNLTFVAPIYGADINGSIYDEGVDEWNIARINTVLDVVEEECGISIEGVNTPYLYFGMWKTTFAWHTEDMDLYSINYLHFGEPKSWYAIPPEHGKRLERLAQGFFPSSSQGCDAFLRHKMTLISPSVLKKYGIPFDKITQEAGEFMITFPYGYHAGFNHGFNCAESTNFATVRWIDYGKVAKLCTCRKDMVKISMDIFVRKFQPDRYQLWKQGKDIYTIDHTKPTPASTPEVKAWLQRRRKVRKASRSFQCARSTSKRPKADEEEEVSDEVDGAEVPNPDSVTDDLKVSEKSEAAVKLRNTEASSEEESSASRMQVEQNLSDHIKLSGNSCLSTSVTEDIKTEDDKAYAYRSVPSISSEADDSIPLSTGYEKPEKSDPSELSWPKSPESCSSVAESNGVLTEGEESDVESHGNGLEPGEIPAVPSGERNSFKVPSIAEGENKTSKSWRHPLSRPPARSPMTLVKQQAPSDEELPEVLSIEEEVEETESWAKPLIHLWQTKSPNFAAEQEYNATVARMKPHCAICTLLMPYHKPDSSNEENDARWETKLDEVVTSEGKTKPLIPEMCFIYSEENIEYSPPNAFLEEDGTSLLISCAKCCVRVHASCYGIPSHEICDGWLCARCKRNAWTAECCLCNLRGGALKQTKNNRWAHVMCAVAVPEVRFTNVPERTQIDVGRIPLQRLKLKCIFCRHRVKRVSGACIQCSYGRCPASFHVTCAHAAGVLMEPDDWPYVVNITCFRHKVNPNVKSKACEKVISVGQTVITKHRNTRYYSCRVMAVTSQTFYEVMFDDGSFSRDTFPEDIVSRDCLKLGPPAEGEVVQVKWPDGKLYGAKYFGSNIAHMYQVEFEDGSQIAMKREDIYTLDEELPKRVKARFSTASDMRFEDTFYGADIIQGERKRQRVLSSRFKNEYVADPVYRTFLKSSFQKKCQKRQ

SEQ ID NO: 1093 - protein, 71 aa, Homo sapiens
IRLNSRGLIYSVGLLLASVFVTVFGVHLNKWQLDKKLGCGCLLLYGVFLCFSIMTEFNVFTFVNLPMCGDH

SEQ ID NO: 1094 - protein, 997 aa, Homo sapiens
MPGGPSPRSPAPLLRPLLLLLCALAPGAPGPAPGRATEGRAALDIVHPVRVDAGGSFLSYELWPRALRKRDVSVRRDAPAFYELQYRGRELRFNLTANQHLLAPGFVSETRRRGGLGRAHIRAHTPACHLLGEVQDPELEGGLAAISACDGLKGVFQLSNEDYFIEPLDSAPARPGHAQPHVVYKRQAPERLAQRGDSSAPSTCGVQVYPELESRRERWEQRQQWRRPRLRRLHQRSVSKEKWVETLVVADAKMVEYHGQPQVESYVLTIMNMVAGLFHDPSIGNPIHITIVRLVLLEDEEEDLKITHHADNTLKSFCKWQKSINMKGDAHPLHHDTAILLTRKDLCAAMNRPCETLGLSHVAGMCQPHRSCSINEDTGLPLAFTVAHELGHSFGIQHDGSGNDCEPVGKRPFIMSPQLLYDAAPLTWSRCSRQYITRFLDRGWGLCLDDPPAKDIIDFPSVPPGVLYDVSHQCRLQYGAYSAFCEDMDNVCHTLWCSVGTTCHSKLDAAVDGTRCGENKWCLSGECVPVGFRPEAVDGGWSGWSAWSICSRSCGMGVQSAERQCTQPTPKYKGRYCVGERKRFRLCNLQACPAGRPSFRHVQCSHFDAMLYKGQLHTWVPVVNDVNPCELHCRPANEYFAKKLRDAVVDGTPCYQVRASRDLCINGICKNVGCDFEIDSGAMEDRCGVCHGNGSTCHTVSGTFEEAEGLGYVDVGLIPAGAREIRIQEVAEAANFLALRSEDPEKYFLNGGWTIQWNGDYQVAGTTFTYARRGNWENLTSPGPTKEPVWIQVPASRGPGGGSRGGVPRPSTLHGRSRPGGVSPGSVTEPGSEPGPPAAASTSVSPSLKWPNLVAAVHRGGWGQAPLGLGGWRRHLVLMGPRLPTQLLFQESNPGVHYEYTIHREAGGHDEVPPPVFSWHYGPWTKCTVTCGRGEKWGRHSPTCRGLVSGQGHWLQLPAHCWATTGLEVCFSEPQFSICEMRLAIALCPRPAGRVHG

SEQ ID NO: 1095 - protein, 592 aa, Homo sapiens
MEGKWLLCMLLVLGTAIVEAHDGHDDDVIDIEDDLDDVIEEVEDSKPDTTAPPSSPKVTYKAPVPTGEVYFADSFDRGTLSGWILSKAKKDDTDDEIAKYDGKWEVEEMKESKLPGDKGLVLMSRAKHHAISAKLNKPFLFDTKPLIVQYEVNFQNGIECGGAYVKLLSKTPELNLDQFHDKTPYTIMFGPDKCGEDYKLHFIFRHKNPKTGIYEEKHAKRPDADLKTYFTDKKTHLYTLILNPDNSFEILVDQSVVNSGNLLNDMTPPVNPSREIEDPEDRKPEDWDERPKIPDPEAVKPDDWDEDAPAKIPDEEATKPEGWLDDEPEYVPDPDAEKPEDWDEDMDGEWEAPQIANPRCESAPGCGVWQRPVIDNPNYKGKWKPPMIDNPSYQGIWKPRKIPNPDFFEDLEPFRMTPFSAIGLELWSMTSDIFFDNFIICADRRIVDDWANDGWGLKKAADGAAEPGVVGQMIEAAEERPWLWVVYILTVALPVFLVILFCCSGKKQTSGMEYKKTDAPQPDVKEEEEEKEEEKDKGDEEEEGEEKLEEKQKSDAEEDGGTVSQEEEDRKPKAEEDEILNRSPRNRKPRRE

SEQ ID NO: 1096 - protein, 418 aa, Homo sapiens
MLPEDKEADSLRGNISVKAVKKEVEKKLRCLLADLPLPPELPGGDDLSKSPEEKKTTTQLHSKRRPKICGPRYGETKEKDIDWGKLCVDKFDIIGIIGEGTYGQVYKARDKDTGEMVALKKVRLDNEKEGFPITAIREIKILRQLTHQSIINMKEIVTDKEDALDFKKDKGAFYLVFEYMDHDLMGLLESGLVHFYENHIKSFMRQLMEGLDYCHKKNFLHRDIKCSNILLNNRGQIKLADFGLARLYSSEESRPYTNKVITLWYRPPELLLGEERYTPAIDVWSCGCILGELFTKKPIFQANQELAQLELISRICGSPCPAVWPDVIKLPYFNTMKPKKQYRRKLREEFVFIPAAALDLFDYMLALDPSKRCTAEQALQCEFLRDVEPSKCLHQISLYGKIVMSYGVKSEEDRSRWA

SEQ ID NO: 1097 - protein, 374 aa, Homo sapiens
DFFEDPSSERKEKKERIPVFCIDVERNDRRAVGHEPEHWSVYRRYLEFYVLESKLTEFHGAFPDAQLPSKRIIGPKNYEFLKSKREEFQEYLQKLLQHPELSNSQLLADFLSPNGGETQFLDKILPDVNLGKIIKSVPGKLMKEKGQHLEPFIMNFINSCESPKPKPSRPELTILSPTSENNKKLFNDLFKNNANRAENTERKQNQNYFMEVMTVEGVYDYLMYVGRVVFQVPDWLHHLLMGTRILFKNTLEMYTDYYLQCKLEQLFQEHRLVSLITLLRDAIFCENTEPRSLQDKQKGAKQTFEEMMNYIPDLLVKCIGEETKYESIRLLFDGLQQPVLNKQLTYVLLDIVIQELFPELNKVQKEVTSVTSWM

SEQ ID NO: 1098 - protein, 1443 aa, Homo sapiens
YGKLTDAYGCLGELRLKSGGTSLSFLVLVTGCTSVGRIPDAEIYKITATDFYPLQEEAKEEERLIALKKILSSGVFYFSWPNDGSRFDLTVRTQKQGDDSSEWGNSFFWNQLLHVPLRQHQVSCCDWLLKIICGVVTIRTVYASHKQAKACLVSRVSCERTGTRFHTRGVNDDGHVSNFVETEQMIYMDDGVSSFVQIRGSVPLFWEQPGLQVGSHHLRLHRGLEANAPAFDRHMVLLKEQYGQQVVVNLLGSRGGEEVLNRAFKKLLWASCHAGDTPMINFDFHQFAKGGKLEKLETLLRPQLKLHWEDFDVFTKGENVSPRFQKGTLRMNCLDCLDRTNTVQSFIALEVLHLQLKTLGLSSKPIVDRFVESFKAMWSLNGHSLSKVFTGSRALEGKAKVGKLKDGARSMSRTIQSNFFDGVKQEAIKLLLVGDVYGEEVADKGGMLLDSTALLVTPRILKAMTERQSEFTNFKRIRIAMGTWNVNGGKQFRSNVLRTAELTDWLLDSPQLSGATDSQDDSSPADIFAVGFEEMVELSAGNIVNASTTNKKMWGEQLQKAISRSHRYILLTSAQLVGVCLYIFVRPYHVPFIRDVAIDTVKTGMGGKAGNKGAVGIRFQFHSTSFCFICSHLTAGQSQVKERNEDYKEITQKLCFPMGRNVFSHDYVFWCGDFNYRIDLTYEEVFYFVKRQDWKKLLEFDQLQLQKSSGKIFKDFHEGAINFGPTYKYDVGSAAYDTSDKCRTPAWTDRVLWWRKKHPFDKTAGELNLLDSDLDVDTKVRHTWSPGALQYYGRAELQASDHRPVLAIVEVEVQEVDVGARERVFQEVSSFQGPLDATVVVNLQSPTLEEKNEFPEDLRTELMQTLGSYGTIVLVRINQGQMLVTFADSHSALSVLDVDGMKVKGRAVKIRPKTKDWLKGLREEIIRKRDSMAPVSPTANSCLLEENFDFTSLDYESEGDILEDDEDYLVDEFNQPGVSDSELGGDDLSDVPGPTALAPPSKSPALTKKKQHPTYKDDADLVELKRELEAVGEFRHRSPSRSLSVPNRPRPPQPPQRPPPPTGLMVKKSASDASISSGTHGQYSILQTARLLPGAPQQPPKARTGISKPYNVKQIKTTNAQEAEAAIRCLLEARGGASEEALSAVAPRDLEASSEPEPTPGAAKPETPQAPPLLPRRPPPRVPAIKKPTLRRTGKPLSPEEQFEQQTVHFTIGPPETSVEAPPVVTAPRVPPVPKPRTFQPGKAAERPSHRKPASDEAPPGAGASVPPPLEAPPLVPKVPPRRKKSAPAAFHLQVLQSNSQLLQGLTYNSSDSPSGHPPAAGTVFPQGDFLSTSSATSPDSDGTKAMKPEAAPLLGDYQDPFWNLLHHPKLLNNTWLSKSSDPLDSGTRSPKRDPIDPVSAGASAAKAELPPDHEHKTLGHWVTISDQEKRTALQVFDPLAKT

SEQ ID NO: 1099 - protein, 1818 aa, Homo sapiens
MDRVGGGKGPGGSYYRVSSSAARSRKLCPGRVNRGLSAQSTAATATMGGKNKQRTKGNLRPSNSGRAAELLAKEQGTVPGFIGFGTSQSDLGYVPAIQGAEEIDSLVDSDFRMVLRKLSKKDVTTKLKAMQEFGTMCTERDTETVKGVLPYWPRIFCKISLDHDRRVREATQQAFEKLILKVKKQLAPYLKSLMGYWLMAQCDTYTPAAFAAKDAFEAAFPPSKQPEAIAFCKDEITSVSSGIIVLQDHLIKETPDTLSDPQTVPEEEREAKFYRVVTCSLLALKRLLCLLPDNELDSLEEKFKSLLSQNKFWKYGKHSVPQIRSAYFELVSALCQRIPQLMKEEASKVSPSVLLSIDDSDPIVCPALWEAVLYTLTTIEDCWLHVNAKKSVFPKLSTVIREGGRGLATVIYPYLLPFISKLPQSITNPKLDFFKNFLTSLVAGLSTERTKTSSLESSAVISAFFECLRFIMQQNLGEEEIEQMLVNDQLIPFIDAVLKDPGLQHGQLFNHLAETLSSWEAKADTEKDEKTAHNLENVLIHFWERLSEICVAKISEPEADVESVLGVSNLLQVLQKPKSSLKSSKKKNGKVRFADEILESNKENEKCVSSEGEKIEGWELTTEPSLTHNSSGLLSPLRKKPLEDLVCKLADISINYVNERKSEQHLRFLSTLLDSFSSSRVFKMLLGDEKQSIVQAKPLEIAKLVQKNPAVQFLYQKLIGWLNEDQRKDFGFLVDILYSALRCCDNDMERKKVLDDLTKVDLKWNSLLKIIEKACPSSDKHALVTPWLKGDILGEKLVNLADCLCNEDLESRVSSESHFSERWTLLSLVLSQHVKNDYLIGDVYVERIIVRLHETLFKTKKLSEAESSDSSVSFICDVAYNYFSSAKGCLLMPSSEDLLLTLFQLCAQSKEKTHLPDFLICKLKNTWLSGVNLLVHQTDSSYKESTFLHLSALWLKNQVQASSLDINSLQVLLSAVDDLLNTLLESEDSYLMGVYIGSVMPNDSEWEKMRQSLPMQWLHRPLLEGRLSLNYECFKTDFKEQDIKTLPSHLCTSALLSKMVLIALRKETVLENNELEKIIAELLYSLQWCEELDNPPIFLIGFCEILQKMNITYDNLRVLGNTSGLLQLLFNRSREHGTLWSLIIAKLILSRSISSDEVKPHYKRKESFFPLTEGNLHTIQSLCPFLSKEEKKEFSAQCIPALLGWTKKDLCSTNGGFGHLAIFNSCLQTKSIDDGELLHGILKIIISWKKEHEDIFLFSCNLSEASPEVLGVNIEIIRFLSLFLKYCSSPLAESEWDFIMCSMLAWLETTSENQALYSIPLVQLFACVSCDLACDLSAFFDSTTLDTIGNLPVNLISEWKEFFSQGIHSLLLPILVTVTGENKDVSETSFQNAMLKPMCETLTYISKEQLLSHKLPARLVADQKTNLPEYLQTLLNTLAPLLLFRARPVQIAVYHMLYKLMPELPQYDQDNLKSYGDEEEEPALSPPAALMSLLSIQEDLLENVLGCIPVGQIVTIKPLSEDFCYVLGYLLTWKLILTFFKAASSQLRALYSMYLRKTKSLNKLLYHLFRLMPENPTYAETAVEVPNKDPKTFFTEELQLSIRETTMLPYHIPHLACSVYHMTLKDLPAMVRLWWNSSEKRVFNIVDRFTSKYVSSVLSFQEISSVQTSTQLFNGMTVKARATTREVMATYTIEDIVIELIIQLPSNYPLGSIIVESGKRVGVAVQQWRNWMLQLSTYLTHQNGSIMEGLALWKNNVDKRFEGVEDCMICFSVIHGFNYSLPKKACRTCKKKFHSACLYKWFTSSNKSTCPLCRETFF

SEQ ID NO: 1100 - protein, 137 aa, Homo sapiens
MGAHLVRRYLGDASVEPDPLQMPTFPPDYGFPERKEREMVATQQEMMDAQLRLQLRDYCAHHLIRLLKCKRDSFPNFLACKQERHDWDYCEHRDYVMRMKEFERERRLLQRKKRREKKAAELAKGQGPGEVDPKVAL

SEQ ID NO: 1101 - protein, 800 aa, Homo sapiens
  VARIANT 346: Xaa = Any Amino Acid
MSSLGASFVQIKFDDLQFFENCGGGSFGSVYRAKWISQDKEVAVKKLLKIEKEAEILSVLSHRNIIQFYGVILEPPNYGIVTEYASLGSLYDYINSNRSEEMDMDHIMTWATDVAKGMHYLHMEAPVKVIHRDLKSRNVVIAADGVLKICDFGASRFHNHTTHMSLVGTFPWMAPEVIQSLPVSETCDTYSYGVVLWEMLTREVPFKGLEGLQVAWLVVEKNERLTIPSSCPRSFAELLHQCWEADAKKRPSFKQIISILESMSNDTSLPDKCNSFLHNKAEWRCEIEATLERLKKLERDLSFKEQELKERERRLKMWEQKLTEQSNTPLLPSFEIGAWTEDDVYXWVQQLVRKGDSSAEMSVYASLFKENNITGKRLLLLEEEDLKDMGIVSKGHIIHFKSAIEKLTHDYINLFHFPPLIKDSGGEPEENEEKIVNLELVFGFHLKPGTGPQDCKWKMYMEMDGDEIAITYIKDVTFNTNLPDAEILKMTKPPFVMEKWIVGIAKSQTVECTVTYESDVRTPKSTKHVHLIQWSRTKPQDEVKAVQLAIQTLFTNSDGNPGSRSDSSADCQWLDTLRMRQIASNTSLQRSQSNPILGSPFFSHFDGQDSYAAAVRRPQVPIKYQQITPVNQSRSSSPTQYGLTKNFSSLHLNSRDSGFSSGNTDTSSERGRYSDRSRNKYGRGSISLNSSPRGRYSGKSQHSTPSRGRYPGKFYRVSQSALNPHQSPDFKRSPRDLHQPNTIPGMPLHPETDSRASEEDSKVSEGGWTKVEYRKKPHRPSPAKTNKERARGDHRGWRNF

SEQ ID NO: 1102 - protein, 2048 aa, Homo sapiens [sequence omitted]

SEQ ID NO: 1103 - protein, 171 aa, Homo sapiens
MLVIEQCKNSRAVTIFIRGGNKMIIEEAKRSLHDALCVIRNLIRDNRVVYGGGAAEISCALAVSQEADKCPTLEQYAMRAFADALEVIPMALSENSGMNPIQTMTEVRARQVKEMNPALGIDCLHKGTNDMKQQHVIETLIGKKQQISLATQMVRMILKIDDIRKPGESEE

SEQ ID NO: 1104 - protein, 63 aa, Homo sapiens
MSLRNLWRDYKVLVVMVPLVGLIHLGWYRIKSSPVFQIPKNDDIPEQDSLGLSNLQKSQIQGK

SEQ ID NO: 1105 - protein, 1010 aa, Homo sapiens
MGYARASGVCARGCLDSAGPWTMSRALRPPLPPLCFFLLLLAAAGARAGGYETCPTVQPNMLNVHLLPHTHDDVGWLKTVDQYFYGIKNDIQHAGVQYILDSVISALLADPTRRFIYVEIAFFSRWWHQQTNATQEVVRDLVRQGRLEFANGGWVMNDEAATHYGAIVDQMTLGLRFLEDTFGNDGRPRVAWHIDPFGHSREQASLFAQMGFDGFFFGRLDYQDKWVRMQKLEMEQVWRASTSLKPPTADLFTGVLPNGYNPPRNLCWDVLCVDQPLVEDPRSPEYNAKELVDYFLNVATAQGRYYRTNHTVMTMGSDFQYENANMWFKNLDKLIRLVNAQQAKGSSVHVLYSTPACYLWELNKANLTWSVKHDDFFPYADGPHQFWTGYFSSRPALKRYERLSYNFLQVCNQLEALVGLAANVGPYGSGDSAPLNEAMAVLQHHDAVSGTSRQHVANDYARQLAAGWGPCEVLLSNALARLRGFKDHFTFCQQLNISICPLSQTAARFQVIVYNPLGRKVNWMVRLPVSEGVFVVKDPNGRTVPSDVVIFPSSDSQAHPPELLFSASLPALGFSTYSVAQVPRWKPQARAPQPIPRRSWSPALTIENEHIRATFDPDTGLLMEIMNMNQQLLLPVRQTFFWYNASIGDNESDQASGAYIFRPNQQKPLPVSRWAQIHLVKTPLVQEVHQNFSAWCSQVVRLYPGQRHLELEWSVGPIPVGDTWGKEVISRFDTPLETKGRFYTDSNGREILERRRDYRPTWKLNQTEPVAGNYYPVNTRIYITDGNMQLTVLTDRSQGGSSLRDGSLELMVHRRLLKDDGRGVSEPLMENGSGAWVRGRHLVLLDTAQAAAAGHRLLAEQEVLAPQVVLAPGGGAAYNLGAPPRTQFSGLRRDLPPSVHLLTLASWGPEMVLLRLEHQFAVGEDSGRNLSAPVTLNLRDLFSTFTITRLQETTLVANQLREAASRLKWTTNTGPTPHQTPYQLDPANITLEPMEIRTFLASVQWKEVDG

SEQ ID NO: 1106 - protein, 465 aa, Homo sapiens
MLPLWTLSLLLGAVAGKEVCYERLGCFSDDSPWSGITERPLHILPWSPKDVNTRFLLYTNENPNNFQEVAADSSSISGSNFKTNRKTRFIIHGFIDKGEENWLANVCKNLFKVESVNCICVDWKGGSRTGYTQASQNIRIVGAEVAYFVEFLQSAFGYSPSNVHVIGHSLGAHAAGEAGRRTNGTIGRITGLDPAEPCFQGTPELVRLDPSDAKFVDVIHTDGAPIVPNLGFGMSQVVGHLDFFPNGGVEMPGCKKNILSQIVDIDGIWEGTRDFAACNHLRSYKYYTDSIVNPDGFAGFPCASYNVFTANKCFPCPSGGCPQMGHYADRYPGKTNDVGQKFYLDTGDASNFARWRYKVSVTLSGKKVTGHILVSLFGNKGNSKQYEIFKGTLKPDSTHSNEFDSDVDVGDLQMVKFIWYNNVINPTLPRVGASKIIVETNVGKQFNFCSPETVREEVLLTLTPC

SEQ ID NO: 1107 - protein, 201 aa, Homo sapiens
MTEKAPEPHVEEDDDDELDSKLNYKPPPQKSLKELQEMDKDDESLIKYKKTLLGDGPVVTDPKAPNVVVTRLTLVCESAPGPITMDLTGDLEALKKETIVLKEGSEYRVKIHFKVNRDIVSGLKYVQHTYRTGVKVDKATFMVGSYGPRPEEYEFLTPVEEAPKGMLARGTYHNKSFFTDDDKQDHLSWEWNLSIKKEWTE

SEQ ID NO: 1108 - protein, 2695 aa, Homo sapiens
MSDKMSSFLHIGDICSLYAEGSTNGFISTLGLVDDRCVVQPETGDLNNPPKKFRDCLFKLCPMNRYSAQKQFWKAAKPGANSTTDAVLLNKLHHAADLEKKQNETENRKLLGTVIQYGNVIQLLHLKSNKYLTVNKRLPALLEKNAMRVTLDEAGNEGSWFYIQPFYKLRSIGDSVVIGDKVVLNPVNAGQPLHASSHQLVDNPGCNEVNSVNCNTSWKIVLFMKWSDNKDDILKGGDVVRLFHAEQEKFLTCDEHRKKQHVFLRTTGRQSATSATSSKALWEVEVVQHDPCRGGAGYWNSLFRFKHLATGHYLAAEVDPDQDASRSRLRNAQEKMVYSLVSVPEGNDISSIFELDPTTLRGGDSLVPRNSYVRLRHLCTNTWVHSTNIPIDKEEEKPVMLKIGTSPVKEDKEAFAIVPVSPAEVRDLDFANDASKVLGSIAGKLEKGTITQNERRSVTKLLEDLVYFVTGGTNSGQDVLEVVFSKPNRERQKLMREQNILKQIFKLLQAPFTDCGDGPMLRLEELGDQRHAPFRHICRLCYRVLRHSQQDYRKNQEYIAKQFGFMQKQIGYDVLAEDTITALLHNNRKLLEKHITAAEIDTFVSLVRKNREPRFLDYLSDLCVSMNKSIPVTQELICKAVLNPTNADILIETKLVLSRFEFEGVSSTGENALEAGEDEEEVWLFWRDSNKEIRSKSVRELAQDAKEGQKEDRDVLSYYRYQLNLFARMCLDRQYLAINEISGQLDVDLILRCMSDENLPYDLRASFCRLMLHMHVDRDPQEQVTPVKYARLWSEIPSEIAIDDYDSSGASKDEIKERFAQTMEFVEEYLRDVVCQRFPFSDKEKNKLTFEVVNLARNLIYFGFYNFSDLLRLTKILLAILDCVHVTTIFPISKMAKGEENKGSNVMRSIHGVGELMTQVVLRGGGFLPMTPMAAAPEGNVKQAEPEKEDIMVMDTKLKIIEILQFILNVRLDYRISCLLCIFKREFDESNSQTSETSSGNSSQEGPSNVPGALDFEHIEEQAEGIFGGSEENTPLDLDDHGGRTFLRVLLHLTMHDYPPLVSGALQLLFRHFSQRQEVLQAFKQVQLLVTSQDVDNYKQIKQDLDQLRSIVEKSELWVYKGQGPDETMDGASGENEHKKTEEGNNKPQKHESTSSYNYRVVKEILIRLSKLCVQESASVRKSRKQQQRLLRNMGAHAVVLELLQIPYEKAEDTKMQEIMRLAHEFLQNFCAGNQQNQALLHKHINLFLNPGILEAVTMQHIFMNNFQLCSEINERVVQHFVHCIETHGRNVQYIKFLQTIVKAEGKFIKKCQDMVMAELVNSGEDVLVFYNDRASFQTLIQMMRSERDRMDENSPLMYHIHLVELLAVCTEGKNVYTEIKCNSLLPLDDIVRVVTHEDCIPEVKIAYINFLNHCYVDTEVEMKEIYTSNHMWKLFENFLVDICRACNNTSDRKHADSILEKYVTEIVMSIVTTFFSSPFSDQSTTLQTRQPVFVQLLQGVFRVYHCNWLMPSQKASVESCIRVLSDVAKSRAIAIPVDLDSQVNNLFLKSHSIVQKTAMNWRLSARNAARRDSVLAASRDYRNIIERLQDIVSALEDRLRPLVQAELSVLVDVLHRPELLFPENTDARRKCESGGFICKLIKHTKQLLEENEEKLCIKVLQTLREMMTKDRGYGEKGEALRQVLVNRYYGNVRPSGRRESLTSFGNGPLSAGGPGKPGGGGGGSGSSSMSRGEMSLAEVQCHLDKEGASNLVIDLIMNASSDRVFHESILLAIALLEGGNTTIQHSFFCRLTEDKKSEKFFKVFYDRMKVAQQEIKATVTVNTSDLGNKKKDDEVDRDAPSRKKAKEPTTQITEEVRDQLLEASAATRKAFTTFRREADPDDHYQPGEGTQATADKAKDDLEMSAVITIMQPILRFLQLLCENHNRDLQNFLRCQNNKTNYNLVCETLQFLDCICGSTTGGLGLLGLYINEKNVALINQTLESLTEYCQGPCHENQNCIATHESNGIDIITALILNDINPLGKKRMDLVLELKNNASKLLLAIMESRHDSENAERILYNMRPKELVEVIKKAYMQGEVEFEDGENGEDGAASPRNVGHNIYILAHQLARHNKELQSMLKPGGQVDGDEALEFYAKHTAQIEIVRLDRTMEQIVFPVPSICEFLTKESKLRIYYTTERDEQGSKINDFFLRSEDLFNEMNWQKKLRAQPVLYWCARNMSFWSSISFNLAVLMNLLVAFFYPFKGVRGGTLEPHWSGLLWTAMLISLAIVIALPKPHGIRALIASTILRLIFSVGLQPTLFLLGAFNVCNKIIFLMSFVGNCGTFTRGYRAMVLDVEFLYHLLYLVICAMGLFVHEFFYSLLLFDLVYREETLLNVIKSVTRNGRSIILTAVLALILVYLFSIVGYLFFKDDFILEVDRLPNETAVPETGESLASEFLFSDVCRVESGENCSSPAPREELVPAEETEQDKEHTCETLLMCIVTVLSHGLRSGGGVGDVLRKPSKEEPLFAARVIYDLLFFFMVIIIVLNLIFGVIIDTFADLRSEKQKKEEILKTTCFICGLERDKFDNKTVTFEEHIKEEHNMWHYLCFIVLVKVKDSTEYTGPESYVAEMIKERNLDWFPRMRAMSLVSSDSEGEQNELRNLQEKLESTMKLVTNLSGQLSELKDQMTEQRKQKQRIGLLGHPPHMNVNPQQPA

SEQ ID NO: 1109 - protein, 249 aa, Homo sapiens
MFFSAALRARAAGLTAHWGRHVRNLHKTAMQNGAGGALFVHRDTPENNPDTPFDFTPENYKRIEAIVKNYPEGHKAAAVLPVLDLAQRQNGWLPISAMNKVAEVLQVPPMRVYEVATFYTMYNRKPVGKYHIQVCTTTPCMLRNSDSILEAIQKKLGIKVGETTPDKLFTLIEVECLGACVNAPMVQINDNYYEDLTAKDIEEIIDELKAGKIPKPGPRSGRFSCEPAGGLTSLTEPPKGPGFGVQAGL

SEQ ID NO: 1110 - protein, 518 aa, Homo sapiens [sequence omitted]

SEQ ID NO: 1111 - protein, 235 aa, Homo sapiens
MNIRNARPEDLMNMQHCNLLCLPENYQMKYYFYHGLSWPQLSYIAEDENGKIVGYVLAKMEEDPDDVPHGHITSLAVKRSHRRLGLAQKLMDQASRAMIENFNAKYVSLHVRKSNRAALHLYSNTLNFQISEVEPKYYADGEDAYAMKRDLTQMADELRRHLELKEKGRHVVLGAIENKVESKGNSPPSSGEACREEKGLAAEDSGGDSKDLSEVSETTESTDVKDSSEASDSAS

SEQ ID NO: 1112 - protein, 437 aa, Homo sapiens
MASPSSFTYYCPPSSSPVWSEPLYSLRPEHARERLQDDSVETVTSIEQAKVEEKIQEVFSSYKFNHLVPRLVLQREKHFHYLKRGLRQLTDAYECLDASRPWLCYWILHSLELLDEPIPQIVATDVCQFLELCQSPEGGFGGGPGQYPHLAPTYAAVNALCIIGTEEAYDIINREKLLQYLYSLKQPDGSFLMHVGGEVDVRSAYCAASVASLTNIITPDLFEGTAEWIARCQNWEGGIGGVPGMEAHGGYTFCGLAALVILKRERSLNLKSLLQWVTSRQMRFEGGFQGRCNKLVDGCYSFWQAGLLPLLHRALHAQGDPALSMSHWMFHQQALQEYILMCCQCPAGGLLDKPGKSRDFYHTCYCLSGLSIAQHFGSGAMLHDVVLGVPENALQPTHPVYNIGPDKVIQATTYFLQKPVPGFEELKDETSAEPATD

SEQ ID NO: 1113 - protein, 294 aa, Homo sapiens
MEDSMDMDMSPLRPQNYLFGCELKADKDYHFKVDNDENEHQLSLRTVSLGAGAKDELHIVEAEAMNYEGSPIKVTLATLKMSVQPTVSLGGFEITPPVVLRLKCGSGPVHISGQHLVAVEEDAESEDEEEEDVKLLSISGKRSAPGGGSKVPQKKVKLAADEDDDDDDEEDDDEDDDDDDFDDEEAEEKAPVKKSIRDTPAKNAQKSNQNGKDSKPSSTPRSKGQESFKKQEKTPKTPKGPSSVEDIKAKMQASIEKGGSLPKVEAKFINYVKNCFRMTDQEAIQDLWQWRKSL

SEQ ID NO: 1114 - protein, 108 aa, Homo sapiens
MAAPCLLRKGRAGALKTMLQEAQVFRGLASTVSLSAESGKSEKGQPQNSKKQSPPKKPAPVPAEPFDNTTYKNLQHHDYSTYTFLDLNLELSKFRMPQPSSGRESPRH

SEQ ID NO: 1115 - protein, 1026 aa, Homo sapiens
MMSFGGADALLGAPFAPLHGGGSLHYALARKGGAGGTRSAAGSSSGFHSWTRTSVSSVSASPSRFRGAGAASSTDSLDTLSNGPEGCMVAVATSRSEKEQLQALNDRFAGYIDKVRQLEAHNRSLEGEAAALRQQQAGRSAMGELYEREVREMRGAVLRLGAARGQLRLEQEHLLEDIAHVRQRLDDEARQREEAEAAARALARFAQEAEAARVDLQKKAQALQEECGYLRRHHQEEVGELLGQIQGSGAAQAQMQAETRDALKCDVTSALREIRAQLEGHAVQSTLQSEEWFRVRLDRLSEAAKVNTDAMRSAQEEITEYRRQLQARTTELEALKSTKDSLERQRSELEDRHQADIASYQEAIQQLDAELRNTKWEMAAQLREYQDLLNVKMALDIEIAAYRKLLEGEECRIGFGPIPFSLPEGLPKIPSVSTHIKVKSEEKIKVVEKSEKETVIVEEQTEETQVTEEVTEEEEKEAKEEEGKEEEGGEEEEAEGGEEETKSPPAEEAASPEKEAKSPVKEEAKSPAEAKSPEKEEAKSPAEVKSPEKAKSPAKEEAKSPPEAKSPEKEEAKSPAEVKSPEKAKSPAKEEAKSPAEAKSPEKAKSPVKEEAKSPAEAKSPVKEEAKSPAEVKSPEKAKSPTKEEAKSPEKAKSPEKAKSPEKEEAKSPEKAKSPVKAEAKSPEKAKSPVKAEAKSPEKAKSPVKEEAKSPEKAKSPVKEEAKSPEKAKSPVKEEAKTPEKAKSPVKEEAKSPEKAKSPEKAKTLDVKSPEAKTPAKEEARSPADKFPEKAKSPVKEEVKSPEKAKSPLKEDAKAPEKEIPKKEEVKSPVKEEEKPQEVKVKEPPKKAEEEKAPATPKTEEKKDSKKEEAPKKEAPKPKVEEKKEPAVEKPKESKVEAKKEEAEDKKKVPTPEKEAPAKVEVKEDAKPKEKTEVAKKEPDDAKAKEPSKPAEKKEAAPEKKDTKEEKAKKPEEKPKTEAKAKEDDKTLSKEPSKPKAEKAEKSSSTDQKDSKPPEKATEDKAAKGK

SEQ ID NO: 1116 - protein, 1198 aa, Homo sapiens
MDEETRHSLECIQANQIFPRKQLIREDENLQVPFLELHGESTEFVGRAEDAIIALSNYRLHIKFKESLVNVPLQLIESVECRDIFQLHLTCKDCKVIRCQFSTFEQCQEWLKRLNNAIRPPAKIEDLFSFAYHAWCMEVYASEKEQHGDLCRPGEHVTSRFKNEVERMGFDMNNAWRISNINEKYKLCGSYPQELIVPAWITDKELESVSSFRSWKRIPAVIYRHQSNGAVIARCGQPEVSWWGWRNADDEHLVQSVAKACASDSRSSGSKLSTRNTSRDFPNGGDLSDVEFDSSLSNASGAESLAIQPQKLLILDARSYAAAVANRAKGGGCECPEYYPNCEVVFMGMANIHSIRRSFQSLRLLCTQMPDPGNWLSALESTKWLHHLSVLLKSALLVVHAVDQDQRPVLVHCSDGWDRTPQIVALAKLLLDPYYRTIEGFQVLVEMEWLDFGHKFADRCGHGENSDDLNERCPVFLQWLDCVHQLQRQFPCSFEFNEAFLVKLVQHTYSCLFGTFLCNNAKERGEKHTQERTCSVWSLLRAGNKAFKNLLYSSQSEAVLYPVCHVRNLMLWSAVYLPCPSPTTPVDDSCAPYPAPGTSPDDPPLSRLPKTRSYDNLTTACDNTVPLASRRCSDPSLNEKWQEHRRSLELSSLAGPGEDPLSADSLGKPTRVPGGAELSVAAGVAEGQMENILQEATKEESGVEEPAHRAGIEIQEGKEDPLLEKESRRKTPEASAIGLHQDPELGDAALRSHLDMSWPLFSQGISEQQSGLSVLLSSLQVPPRGEDSLEVPVEQFRIEEIAEGREEAVLPIPVDAKVGYGTSQSCSLLPSQVPFETRGPNVDSSTDMLVEDKVKSVSGPQGHHRSCLVNSGKDRLPQTMEPSPSETSLVERPQVGSVVHRTSLGSTLSLTRSPCALPLAECKEGLVCNGAPETENRASEQPPGLSTLQMYPTPNGHCANGEAGRSKDSLSRQLSAMSCSSAHLHSRNLHHKWLHSHSGRPSATSSPDQPSRSHLDDDGMSVYTDTIQQRLRQIESGHQQEVETLKKQVQELKSRLESQYLTSSLHFNGDFGDEVTSIPDSESNLDQNCLSRCSTEIFSEASWEQVDKQDTEMTRWLPDHLAAHCYACDSAFWLASRKHHCRNCGNVFCSSCCNQKVPVPSQQLFEPSRVCKSCYSSLHPTSSSIDLELDKPIAATSN

SEQ ID NO: 1117 - protein, 233 aa, Homo sapiens [sequence omitted]

SEQ ID NO: 1118 - protein, 128 aa, Homo sapiens
MGIQGGSVLFGLLLVLAVFCHSGHSLQCYNCPNPTADCKTAVNCSSDFDACLITKAGLQVYNKCWKFEHCNFNDVTTRLRENELTYYCCKKDLCNFNEQLENGGTSLSEKTVLLLVTPFLAAAWSLHP

SEQ ID NO: 1119 - protein, 1434 aa, Homo sapiens
MEDHMFGVQQIQPNVISVRLFKRKVGGLGFLVKERVSKPPVIISDLIRGGAAEQSGLIQAGDIILAVNGRPLVDLSYDSALEVLRGIASETHVVLILRGPEGFTTHLETTFTGDGTPKTIRVTQPLGPPTKAVDLSHQPPAGKEQPLAVDGASGPGNGPQHAYDDGQEAGSLPHANGLAPRPPGQDPAKKATRVSLQGRGENNELLKEIEPVLSLLTSGSRGVKGGAPAKAEMKDMGIQVDRDLDGKSHKPLPLGVENDRVFNDLWGKGNVPVVLNNPYSEKEQPPTSGKQSPTKNGSPSKCPRFLKVKNWETEVVLTDTLHLKSTLETGCTEYICMGSIMHPSQHARRPEDVRTKGQLFPLAKEFIDQYYSSIKRFGSKAHMERLEEVNKEIDTTSTYQLKDTELIYGAKHAWRNASRCVGRIQWSKLQVFDARDCTTAHGMFNYICNHVKYATNKGNLRSAITIFPQRTDGKHDFRVWNSQLIRYAGYKQPDGSTLGDPANVQFTEICIQQGWKPPRGRFDVLPLLLQANGNDPELFQIPPELVLEVPIRHPKFEWFKDLGLKWYGLPAVSNMLLEIGGLEFSACPFSGWYMGTEIGVRDYCDNSRYNILEEVAKKMNLDMRKTSSLWKDQALVEINIAVLYSFQSDKVTIVDHHSATESFIKHMENEYRCRGGCPADWVWIVPPMSGSITPVFHQEMLNYRLTPSFEYQPDPWNTHVWKGTNGTPTKRRAIGFKKLAEAVKFSAKLMGQAMAKRVKATILYATETGKSQAYAKTLCEIFKHAFDAKVMSMEEYDIVHLEHETLVLVVTSTFGNGDPPENGEKFGCALMEMRHPNSVQEERKSYKVRFNSVSSYSDSQKSSGDGPDLRDNFESAGPLANVRFSVFGLGSRAYPHFCAFGHAVDTLLEELGGERILKMREGDELCGQEEAFRTWAKKVFKAACDVFCVGDDVNIEKANNSLISNDRSWKRNKFRLTFVAEAPELTQGLSNVHKKRVSAARLLSRQNLQSPKSSRSTIFVRLHTNGSQELQYQPGDHLGVFPGNHEDLVNALIERLEDAPPVNQMVKVELLEERNTALGVISNWTDELRLPPCTIFQAFKYYLDITTPPTPLQLQQFASLATSEKEKQRLLVLSKGLQEYEEWKWGKNPTIVEVLEEFPSIQMPATLLLTQLSLLQPRYYSISSSPDMYPDEVHLTVAIVSYRTRDGEGPIHHGVCSSWLNRIQADELVPCFVRGAPSFHLPRNPQVPCILVGPGTGIAPFRSFWQQRQFDIQHKGMNPCPMVLVFGCRQSKIDHIYREETLQAKNKGVFRELYTAYSREPDKPKKYVQDILQEQLAESVYRALKEQGGHIYVCGDVTMAADVLKAIQRIMTQQGKLSAEDAGVFISRMRDDNRYHEDIFGVTLRTYEVTNRLRSESIAFIEESKKDTDEVFSS

SEQ ID NO: 1120 - protein, 479 aa, Homo sapiens
MACRQEPQPQGPPPAAGAVASYDYLVIGGGSGGLASARRAAELGARAAVVESHKLGGTCVNVGCVPKKVMWNTAVHSEFMHDHADYGFPSCEGKFNWRVIKEKRDAYVSRLNAIYQNNLTKSHIEIIRGHAAFTSDPKPTIEVSGKKYTAPHILIATGGMPSTPHESQIPGASLGITSDGFFQLEELPGRSVIVGAGYIAVEMAGILSALGSKTSLMIRHDKVLRSFDSMISTNCTEELENAGVEVLKFSQVKEVKKTLSGLEVSMVTAVPGRLPVMTMIPDVDCLLWAIGRVPNTKDLSLNKLGIQTDDKGHIIVDEFQNTNVKGIYAVGDVCGKALLTPVAIAAGRKLAHRLFEYKEDSKLDYNNIPTVVFSHPPIGTVGLTEDEAIHKYGIENVKTYSTSFTPMYHAVTKRKTKCVMKMVCANKEEKVVGIHMQGLGCDEMLQGFAVAVKMGATKADFDNTVAIHPTSSEELVTLR

SEQ ID NO: 1121 - protein, 994 aa, Homo sapiens
MEAAHAKTTEECLAYFGVSETTGLTPDQVKRNLEKYGLNELPAEEGKTLWELVIEQFEDLLVRILLLAACISFVLAWFEEGEETITAFVEPFVILLILIANAIVGVWQERNAENAIEALKEYEPEMGKVYRADRKSVQRIKARDIVPGDIVEVAVGDKVPADIRILAIKSTTLRVDQSILTGESVSVIKHTEPVPDPRAVNQDKKNMLFSGTNIAAGKALGIVATTGVGTEIGKIRDQMAATEQDKTPLQQKLDEFGEQLSKVISLICVAVWLINIGHFNDPVHGGSWFRGAIYYFKIAVALAVAAIPEGLPAVITTCLALGTRRMAKKNAIVRSLPSVETLGCTSVICSDKTGTLTTNQMSVCKMFIIDKVDGDICLLNEFSITGSTYAPEGEVLKNDKPVRPGQYDGLVELATICALCNDSSLDFNEAKGVYEKVGEATETALTTLVEKMNVFNTDVRSLSKVERANACNSVIRQLMKKEFTLEFSRDRKSMSVYCSPAKSSRAAVGNKMFVKGAPEGVIDRCNYVRVGTTRVPLTGPVKEKIMAVIKEWGTGRDTLRCLALATRDTPPKREEMVLDDSARFLEYETDLTFVGVVGMLDPPRKEVTGSIQLCRDAGIRVIMITGDNKGTAIAICRRIGIFGENEEVADRAYTGREFDDLPLAEQREACRRACCFARVEPSHKSKIVEYLQSYDEITAMTGDGVNDAPALKKAEIGIAMGSGTAVAKTASEMVLADDNFSTIVAAVEEGRAIYNNMKQFIRYLISSNVGEVVCIFLTAALGLPEALIPVQLLWVNLVTDGLPATALGFNPPDLDIMDRPPRSPKEPLISGWLFFRYMAIGGYVGAATVGAAAWWFLYAEDGPHVNYSQLTHFMQCTEDNTHFEGIDCEVFEAPEPMTMALSVLVTIEMCNALNSLSENQSLLRMPPWVNIWLLGSICLSMSLHFLILYVDPLPMIFKLRALDLTQWLMVLKISLPVIGLDEILKFVARNYLEG

SEQ ID NO: 1122 - protein, 606 aa, Homo sapiens
MSDTSESGAGLTRFQAEASEKDSSSMMQTLLTVTQNVEVPETPKASKALEVSEDVKVSKASGVSKATEVSKTPEAREAPATQASSTTQLTDTQVLAAENKSLAADTKKQNADPQAVTMPATETKKVSHVADTKVNTKAQETEAAPSQAPADEPEPESAAAQSQENQDTRPKVKAKKARKVKHLDGEEDGSSDQSQASGTTGGRRVSKALMASMARRASRGPIAFWARRASRTRLAAWARRALLSLRSPKARRGKARRRAAKLQSSQEPEAPPPRDVALLQGRANDLVKYLLAKDQTKIPIKRSDMLKDIIKEYTDVYPEIIERAGYSLEKVFGIQLKEIDKNDHLYILLSTLEPTDAGILGTTKDSPKLGLLMVLLSIIFMNGNRSSEAVIWEVLRKLGLRPGIHHSLFGDVKKLITDEFVKQKYLDYARVPNSNPPEYEFFWGLRSYYETSKMKVLKFACKVQKKDPKEWAAQYREAMEADLKAAAEAAAEAKARAEIRARMGIGLGSENAAGPCNWDEADIGPWAKARIQAGAEAKAKAQESGSASTGASTSTNNSASASASTSGGFSAGASLTATLTFGLFAGLGGAGASTSGSSGACGFSYK

SEQ ID NO: 1123 - protein, 165 aa, Homo sapiens
MVNPTVFFDIAVDGEPLGRVSFELFADKVPKTAENFRALSTGEKGFGYKGSCFHRIIPGFMCQGGDFTRHNGTGGKSIYGEKFEDENFILKHTGPGILSMANAGPNTNGSQFFICTAKTEWLDGKHVVFGKVKEGMNIVEAMERFGSRNGKTSKKITIADCGQLE

SEQ ID NO: 1124 - protein, 732 aa, Homo sapiens
MVRSGNKAAVVLCMDVGFTMSNSIPGIESPFEQAKKVITMFVQRQVFAENKDEIALVLFGTDGTDNPLSGGDQYQNITVHRHLMLPDFDLLEDIESKIQPGSQQADFLDALIVSMDVIQHETIGKKFEKRHIEIFTDLSSRFSKSQLDIIIHSLKKCDISLQFFLPFSLGKEDGSGDRGDGPFRLGGHGPSFPLKGITEQQKEGLEIVKMVMISLEGEDGLDEIYSFSESLRKLCVFKKIERHSIHWPCRLTIGSNLSIRIAAYKSILQERVKKTWTVVDAKTLKKEDIQKETVYCLNDDDETEVLKEDIIQGFRYGSDIVPFSKVDEEQMKYKSEGKCFSVLGFCKSSQVQRRFFMGNQVLKVFAARDDEAAAVALSSLIHALDDLDMVAIVRYAYDKRANPQVGVAFPHIKHNYECLVYVQLPFMEDLRQYMFSSLKNSKKYAPTEAQLNAVDALIDSMSLAKKDEKTDTLEDLFPTTKIPNPRFQRLFQCLLHRALHPREPLPPIQQHIWNMLNPPAEVTTKSQIPLSKIKTLFPLIEAKKKDQVTAQEIFQDNHEDGPTAKKLKTEQGGAHFSVSSLAEGSVTSVGSVNPAENFRVLVKQKKASFEEASNQLINHIEQFLDTNETPYFMKSIDCIRAFREEAIKFSEEQRFNNFLKALQEKVEIKQLNHFWEIVVQDGITLITKEEASGSSVTAEEAKKFLAPKDKPSGDTAAVFEEGGDVDDLLDMI

SEQ ID NO: 1125 - protein, 312 aa, Homo sapiens
MFLRRLGGWLPRPWGRRKPMRPDPPYPEPRRVDSSSENSGSDWDSAPETMEDVGHPKTKDSGALRVSRAASEPSKEEPQVEQLGSKRMDSLKWDQPISSTQESGRLEAGGASPKLRWDHVDSGGTRRPGVSPEGDSSVPGPGAPLEKPGRREKLLGWLRGEPGAPSRYLGGPEECLQISTNLTLHLLELLASALLALCSRPLRAALDTLGLRGPLGLWLHGLLSFLAALHGLHAVLSLLTAHPLHFACLFGLLQALVLAVSSGSPMGMRRPLTGRVRGWRGKVRSRGETRERGCDRGVGAKGEESVGFRRKV

SEQ ID NO: 1126 - protein, 450 aa, Homo sapiens
MVPLVAVVSGPRAQLFACLLRLGTQQVGPLQLHTGASHAARNHYEVLVLGGGSGGITMAARMKRKVGAENVAIVEPSERHFYQPIWTLVGAGAKQLSSSGRPTASVIPSGVEWIKARVTELNPDKNCIHTDDDEKISYRYLIIALGIQLDYEKIKGLPEGFAHPKIGSNYSVKTVEKTWKALQDFKEGNAIFTFPNTPVKCAGAPQKIMYLSEAYFRKTGKRSKANIIFNTSLGAIFGVKKYADALQEIIQERNLTVNYKKNLIEVRADKQEAVFENLDKPGETQVISYEMLHVTPPMSPPDVLKTSPVADAAGWVDVDKETLQHRRYPNVFGIGDCTNLPTSKTAAAVAAQSGILDRTISVIMKNQTPTKKYDGYTSCPLVTGYNRVILAEFDYKAEPLETFPFDQSKERLSMYLMKADLMPFLYWNMMLRGYWGGPAFLRKLFHLGMS

SEQ ID NO: 1127 - protein, 536 aa, Homo sapiens
MSPRVVSNSSVLASQSVGITNVRTVFSNVFNNTTAFPILRGSNCHKITAPGLGKGQLVNLLPPENLPWCGGSQGPRMLRTCYVLCSQAGPPSRGWQSLSFDGGAFHLKGTGELTRALLVLRLCAWPPLVTHGLLLQAWSRRLLGSRLSGAFLRASVYGQFVAGETAEEVKGCVQQLRTLSLRPLLAVPTEEEPDSAAKSGEAWYEGNLGAMLRCVDLSRGLLEPPSLAEASLMQLKVTALTSTRLCKELASWVRRPGASLELSPERLAEAMDSGQNLQVSCLNAEQNQHLRASLSRLHRVAQYARAQHVRLLVDAEYTSLNPALSLLVAALAVRWNSPGEGGPWVWNTYQACLKDTFERLGRDAEAAHRAGLAFGVKLVRGAYLDKERAVAQLHGMEDPTQPDYEATSQSYSRCLELMLTHVARHGPMCHLMVASHNEESVRQATKRMWELGIPLDGTVCFGQLLGMCDHVSLALGQAGYVVYKSIPYGSLEEVIPYLIRRAQENRSVLQGARREQELLSQELWRRLLPGCRRIPH

SEQ ID NO: 1128 - protein, 2353 aa, Homo sapiens
MTEGARAADEVRVPLGAPPPGPAALVGASPESPGAPGREAERGSELGVSPSESPAAERGAELGADEEQRVPYPALAATVFFCLGQTTRPRSWCLRLVCNPWFEHVSMLVIMLNCVTLGMFRPCEDVECGSERCNILEAFDAFIFAFFAVEMVIKMVALGLFGQKCYLGDTWNRLDFFIVVAGMMEYSLDGHNVSLSAIRTVRVLRPLRAINRVPSMRILVTLLLDTLPMLGNVLLLCFFVFFIFGIVGVQLWAGLLRNRCFLDSAFVRNNNLTFLRPYYQTEEGEENPFICSSRRDNGMQKCSHIPGRRELRMPCTLGWEAYTQPQAEGVGAARNACINWNQYYNVCRSGDSNPHNGAINFDNIGYAWIAIFQVITLEGWVDIMYYVMDAHSFYNFIYFILLIIVGSFFMINLCLVVIATQFSETKQRESQLMREQRARHLSNDSTLASFSEPGSCYEELLKYVGHIFRKVKRRSLRLYARWQSRWRKKVDPSAVQGQGPGHRQRRAGRHTASVHHLVYHHHHHHHHHYHFSHGSPRRPGPEPGACDTRLVRAGAPPSPPSPGRGPPDAESVHSIYHADCHIEGPQERARVAHAAATAAASLRLATGLGTMNYPTILPSGVGSGKGSTSPGPKGKWAGGPPGTGGHGPLSLNSPDPYEKIPHVVGEHGLGQAPGHLSGLSVPCPLPSPPAGTLTCELKSCPYCTRALEDPEGELSGSESGDSDGRGVYEFTQDVRHGDRWDPTRPPRATDTPGPGPGSPQRRAQQRAAPGEPGWMGRLWVTFSGKLRRIVDSKYFSRGIMMAILVNTLSMGVEYHEQPEELTNALEISNIVFTSMFALEMLLKLLACGPLGYIRNPYNIFDGIIVVISVWEIVGQADGGLSVLRTFRLLRVLKLVRFLPALRRQLVVLVKTMDNVATFCTLLMLFIFIFSILGMHLFGCKFSLKTDTGDTVPDRKNFDSLLWAIVTVFQILTQEDWNVVLYNGMASTSSWAALYFVALMTFGNYVLFNLLVAILVEGFQAEGDANRSDTDEDKTSVHFEEDFHKLRELQTTELKMCSLAVTPNGHLEGRGSLSPPLIMCTAATPMPTPKSSPFLDAAPSLPDSRRGSSSSGDPPLGDQKPPASLRSSPCAPWGPSGAWSSRRSSWSSLGRAPSLKRRGQCGERESLLSGEGKGSTDDEAEDGRAAPGPRATPLRRAESLDPRPLRPAALPPTKCRDRDGQVVALPSDFFLRIDSHREDAAELDDDSEDSCCLRLHKVLEPYKPQWCRSREAWALYLFSPQNRFRVSCQKVITHKMFDHVVLVFIFLNCVTIALERPDIDPGSTERVFLSVSNYIFTAIFVAEMMVKVVALGLLSGEHAYLQSSWNLLDGLLVLVSLVDIVVAMASAGGAKILGVLRVLRLLRTLRPLRVISRAPGLKLVVETLISSLRPIGNIVLICCAFFIIFGILGVQLFKGKFYYCEGPDTRNISTKAQCRAAHYRWVRRKYNFDNLGQALMSLFVLSSKDGWVNIMYDGLDAVGVDQQPVQNHNPWMLLYFISFLLIVSFFVLNMFVGVVVENFHKCRQHQEAEEARRREEKRLRRLERRRRSTFPSPEAQRRPYYADYSPTRRSIHSLCTSHYLDLFITFIICVNVITMSMEHYNQPKSLDEALKYCNYVFTIVFVFEAALKLVAFGFRRFFKDRWNQLDLAIVLLSLMGITLEEIEMSAALPINPTIIRIMRVLRIARVLKLLKMATGMRALLDTVVQALPQVGNLGLLFMLLFFIYAALGVELFGRLECSEDNPCEGLSRHATFSNFGMAFLTLFRVSTGDNWNGIMKDTLRECSREDKHCLSYLPALSPVYFVTFVLVAQFVLVNVVVAVLMKHLEESNKEAREDAELDAEIELEMAQGPGSARRVDADRPPLPQESPGARDAPNLVARKVSVSRMLSLPNDSYMFRPVVPASAPHPRPLQEVEMETYGAGTPLGSVASVHSPPAESCASLQIPLAVSSPARSGEPLHALSPRGTARSPSLSRLLCRQEAVHTDSLEGKIDSPRDTLDPAEPGEKTPVRPVTQGGSLQSPPRSPRPASVRTRKHTFGQHCVSSRPAAPGGEEAEASDPADEEVSHITSSACPWQPTAEPHGPEASPVAGGERDLRRLYSVDAQGFLDKPGRADEQWRPSAELGSGEPGEAKAWGPEAEPALGARRKKKMSPPCISVEPPAEDEGSARPSAAEGGSTTLRRRTPSCEATPHRDSLEPTEGSGAGGDPAAKGERWGQASCRAEHLTVPSFAFEPLDLGVPSGDPFLDGSHSVTPESRASSSGAIVPLEPPESEPPMPVGDPPEKRRGLYLTVPQCPLEKPGSPSATPAPGGGADDPV

SEQ ID NO: 1129 - protein, 1150 aa, Homo sapiens
MSKTLKKKKHWLSKVQECAVSWAGPPGDFGAEIRGGAERGEFPYLGRLREEPGGGTCCIVSGKAPNPSDVLLEVNGTPVSGLTNRDTLAVIRHFREPIRLKTVKPGKVINKDLRHYLSLQFQKGSIDHKLQQVIRDNLYLRTIPCTTRAPRDGEVPGVDYNFISVEQFKALEESGALLESGTYDGNFYGTPKPPAEPSPFQPDPVDQVLFDNEFDAESQRKRTTSVSKMERMDSSLPEEEEDEDKGAINGSGNAENRERHSESSDWMKTVPSYNQTNSSMDFRNYMMRDETLEPLPKNWEMAYTDTGMIYFIDHNTKTTTWLDPRLCKKAKAPEDCEDGELPYGWEKIEDPQYGTYYVDFTLVAQAGVQWHDLGSLQPPPPGFNHLNQKTQFENPVEEAKRKKQLGQVEIGSSKPDMEKSHFTRDPSQLKGVLVRASLKKSTMGFGFTIIGGDRPDEFLQVKNVLKDGPAAQDGKIAPGDVIVDINGNCVFGHTHADVVQMFQLVPVNQYVNLTLCRGYPLPDDSEDPVVDIVAATPVINGQSLTKGETCMNPQDFKPGAMVLEQNGKSGHTSTGDGLNGPSDASEQRVSMASSGSSQPELVTIPLIKGPKGFGFAIADSPTGQKVKMILDSQWCQGLQKEDIIKEIYHQNVQNLTHLQVVEVLKQFPVGADVPLLILRGGPPSTTKTAKMKTDKKENAGSLEAINEPIPQPMPFPPSIIRSGSPKLDPSEVYLKSKTLYEDKPPNTKDLDVFLRKQESGFGFRVLGGDGPDQSIYIGAIIPLGAAEKDGRLRAADELMCIDGIPVKGKSHKQVLDLMTTAARNGHVLLTVRRKIFYGEKQPEDDSSQAFISTQNGSPRLNRAEVPARPAPQEPYDVVLQRKENEGFGFVILTSKNKPPPGVIPHKIGRVIEGSPADRCGKLKVGDHISAVNGQSIVELSHANIVQLIKDAGVTVTLTVIAEEEHHGPPSGTNSARQSPALQHRPMGQSQANHIPGDRSALEGEIGKDVSTSYRHSWSDHKHLAQPDTAVISVVGSRHNQNLGCYPVELERGPRGFGFSLRGGKEYNMGLFILRLAEDGPAIKDGRIHVGDQIVEINGEPTQGITHTRAIELIQAGGNKVLLLLRPGTGLIPDHGLAPSGLCSYVKPEQH

SEQ ID NO: 1130 - protein, 747 aa, Homo sapiens
MSQVKSSYSYDAPSDFINFSSLDDEGDTQNIDSWFEEKANLENKLLGKNGTGGLFQGKTPLRKANLQQAIVTPLKPVDNTYYKEAEKENLVEQSIPSNACSSLEVEAAISRKTPAQPQRRSLRLSAQKDLEQKEKHHVKMKAKRCATPVIIDEILPSKKMKVSNNKKKPEEEGSAHQDTAEKNASSPEKAKGRHTVPCMPPAKQKFLKSTEEQELEKSMKMQQEVVEMRKKNEEFKKLALAGIGQPVKKSVSQVTKSVDFHFRTDERIKQHPENQEEYKEVNFTSELRKHPSSPARVTKGCTIVKPFNLSQGKKRTFDETVSTYVPLAQQVEDFHKRTPNRYHLRSKKDDINLLPSKSSVTKICRDPQTPVLQTKHRARAVTCKSTAELEAEELEKLQQYKFKARELDPRILEGGPILPKKPPVKPPTEPIGFDLEIEKRIQERESKKKTEDEHFEFHSRPCPTKILEDVVGVPEKKVLPITVPKSPAFALKNRIRMPTKEDEEEDEPVVIKAQPVPHYGVPFKPQIPEARTVEICPFSFDSRDKERQLQKEKKIKELQKGEVPKFKALPLPHFDTINLPEKKVKNVTQIEPFCLETDRRGALKAQTWKHQLEEELRQQKEAACFKARPNTVISQEPFVPKKEKKSVAEGLSGSLVQEPFQLATEKRAKERQELEKRMAEVEAQKAQQLEEARLQEEEQKKEELARLRRELVHKANPIRKYQGLEIKSSDQPLTVPVSPKFSTRFHC

SEQ ID NO: 1131 - protein, 229 aa, Homo sapiens
MQIFVKTLTGKTITLEVEPSDTIENVKAKIQDKEGIPPDQQRLIFAGKQLEDGRTLSDYNIQKESTLHLVLRLRGGMQIFVKTLTGKTITLEVEPSDTIENVKAKIQDKEGIPPDQQRLIFAGKQLEDGRTLSDYNIQKESTLHLVLRLRGGMQIFVKTLTGKTITLEVEPSDTIENVKAKIQDKEGIPPDQQRLIFAGKQLEDGRTLSDYNIQKESTLHLVLRLRGGC

SEQ ID NO: 1132 - protein, 198 aa, Homo sapiens
MATLWGGLLRLGSLLSLSCLALSVLLLAQLSDAAKNFEDVRCKCICPPYKENSGHIYNKNISQKDCDCLHVVEPMPVRGPDVEAYCLRCECKYEERSSVTIKVTIIIYLSILGLLLLYMVYLTLVEPILKRRLFGHAQLIQSDDDIGDHQPFANAHDVLARSRSRANVLNKVEYAQQRWKLQVQEQRKSVFDRHVVLS

SEQ ID NO: 1133 - protein, 229 aa, Homo sapiens
MARLALSPVPSHWMVALLLLLSAEPVPAARSEDRYRNPKGSACSRIWQSPRFIARKRGFTVKMHCYMNSASGNVSWLWKQEMDENPQQLKLEKGRMEESQNESLATLTIQGIRFEDNGIYFCQQKCNNTSEVYQGCGTELRVMGFSTLAQLKQRNTLKDGIIMIQTLLIILFIIVPIFLLLDKDDSKAGMEEDHTYEGLDIDQTATYEDIVTLRTGEVKWSVGEHPGQE

SEQ ID NO: 1134 - protein, 340 aa, Homo sapiens
MSELEQLRQEAEQLRNQIQDARKACNDATLVQITSNMDSVGRIQMRTRRTLRGHLAKIYAMHWGYDSRLLVSASQDGKLIIWDSYTTNKMHAIPLRSSWVMTCAYAPSGNYVACGGLDNICSIYNLKTREGNVRVSRELPGHTGYLSCCRFLDDSQIVTSSGDTTCALWDIETAQQTTTFTGHSGDVMSLSLSPDMRTFVSGACDASSKLWDIRDGMCRQSFTGHVSDINAVSFFPNGYAFATGSDDATCRLFDLRADQELLLYSHDNIICGITSVAFSKSGRLLLAGYDDFNCNVWDTLKGDRAGVLAGHDNRVSCLGVTDDGMAVATGSWDSFLRIWN

SEQ ID NO: 1135 - protein, 932 aa, Homo sapiens
MAALQKLPHCRKLVLLCFLLATLWEARAGQIRYSVREEIDRGSFVGNIAKDLGLEPLALAEQGVRIVSRGRSQLFALNPRSGSLVTANRIDREELCAQSAPCLLNFNILLEDKLTIYSVEVEITDINDNAPRFGVEELELKISETTTPGFRIPLKNAHDADVGENALQKYALNPNDHFSLDVRRGADGNKYPELVLERSLDREEEAVHHLVLVASDGGDPVLSGTSRICVKVLDANDNAPVFTQPEYRISIPENTLVGTRILTVTATDADEGYYAQVVYFLEKSPGETSEVFELKSTSGELTIIKDLDYEDATFHEIDIEAQDGPGLLTRAKVIVTVLDVNDNAPEFYMTSATSSVSEDSLPGTIIGLFNVHDRDSGQNAFTTCSLPEDLPFKLEKSVDNYYRLVTTRALDREQFSFYNITLTAKDGGNPSLSTDAHILLQVADINDNAPAFSRTSYSTYIPENNPRGASVFSVTAHDPDSNDNAHVTYSFAEDTVQGAPLSSYISINSDTGVLYALRSFDYEQLRDLQVWVIARDSGNPPLSSNVSLSLFVLDQNDNAPEILYPAFPTDGSTGVELAPRSAEPGYLVTKVVAVDRDSGQNAWLSYHLLKASEPGLFSVGLHTGEVRTARALLDRDALKQSLVVAIQDHGQPPLSATVTLTVAVADRIPDILADLGSLEPSAIPNDSDLTLYLVVAVAAVSCVFLAFVIVLLAHRLRRWHKSRLLQASGGSLTGMQSSHFVGVDGVRAFLQTYSHEVSLTADSRKSHLIFPQPNYADTLISQESCEKKDFLSAPQSLLEEEREETFSQQAPPNTDWRFSQAQRPGTSGSQNGDDTGTWPNNQFDTEMLQAMILASASEAADGSSTLGGGAGTMGLSARYGPQFTLQHVPDYRQNVYIPGSNATLTNAAGKRDGKAPAGGNGNKKKSGKKEKK

SEQ ID NO: 1136 - protein, 31 aa, Homo sapiens
MVHLTPEEKSAVTALWGKVNVDEVGGKALGR

SEQ ID NO: 1137 - protein, 541 aa, Homo sapiens [sequence omitted]

SEQ ID NO: 1138 - protein, 307 aa, Homo sapiens
NSREAVCIVLSDDTCSDEKIRMNRVVRNNLRVRLGDVISIQPCPDVKYGKRIHVLPIDDTVEGITGNLFEVYLKPYFLEAYRPIRKGDIFLVRGGMRAVEFKVVETDPSPYCIVAPDTVIHCEGEPIKREDEEESLNEVGYDDIGGCRKQLAQIKEMVELPLRHPALFKAIGVKPPRGILLYGPPGTGKTLIARAVANETGAFFFLINGPEIMSKLAGESESNLRKAFEEAEKNAPAIIFIDELDAIAPKREKTHGEVERRIVSQLLTLMDGLKQRAHVIVMAATNRPNSIDPALRRFGRFDREVDI

SEQ ID NO: 1139 - protein, 1388 aa, Homo sapiens [sequence omitted]

SEQ ID NO: 1140 - protein, 797 aa, Homo sapiens
MAAAPVAAGSGAGRGRRSAATVAAWGGWGGRPRPGNILLQLRQGQLTGRGLVRAVQFTETFLTERDKQSKWSGIPQLLLKLHTTSHLHSDFVECQNILKEISPLLSMEAMAFVTEERKLTQETTYPNTYIFDLFGGVDLLVEILMRPTISIRGQKLKISDEMSKDCLSILYNTCVCTEGVTKRLAEKNDFVIFLFTLMTSKKTFLQTATLIEDILGVKKEMIRLDEVPNLSSLVSNFDQQQLANFCRILAVTISEMDTGNDDKHTLLAKNAQQKKSLSLGPSAAEINQAALLSIPGFVERLCKLATRKVSESTGTASFLQELEEWYTWLDNALVLDALMRVANEESEHNQASIVFPPPGASEENGLPHTSARTQLPQSMKIMHEIMYKLEVLYVLCVLLMGRQRNQVHRMIAEFKLIPGLNNLFDKLIWRKHSASALVLHGHNQNCDCSPDITLKIQFLRLLQSFSDHHENKYLLLNNQELNELSAISLKANIPEVEAVLNTDRSLVCDGKRGLLTRLLQVMKKEPAESSFRFWQARAVESFLRGTTSYADQMFLLKRGLLEHILYCIVDSECKSRDVLQSYFDLLGELMKFNVDAFKRFNKYINTDAKFQVFLKQINSSLVDSNMLVRCVTLSLDRFENQVDMKVAEVLSECRLLAYISQVPTQMSFLFRLINIIHVQTLTQENVSCLNTSLVILMLARRKERLPLYLRLLQRMEHSKKYPGFLLNNFHNLLRFWQQHYLHKDKDSTCLENSSCISFSYWKETVSILLNPDRQSPSALVSYIEEPYMDIDRDFTEE

SEQ ID NO: 1141 - protein, 492 aa, Homo sapiens
MGGNISVAFAAPRQRGKGEITPAAIQKMLDDNNHLIQCIMDSQNKGKTSECSQYQQMLHTNLVYLATIADSNQNMQSLLPAPPTQNMPMGPGGMNQSGPPPPPRSHNMPSDGMVGGGPPAPHMQNQMNGQMPGPNHMPMQGPGPNQLNMTNSSMNMPSSSHGSMGGYNHSVPSSQSMPVQNQMTMSQGQPMGNYGPRPNMSMQPNQGPMMRQQPPSQQYNMPQGGGQHYQGQQPPMGMMGQVNQGNHMMGQRQIPPYRPPQQGPPQQYSGQEDYYGDQYSHGGQGPPEGMNQQYYPDGHNDYGYQQPSYPEQGYDRPYEDSSQHYYEGGNSQYGQQQDAYQGPPPQQGYPPQQQQYPGQQGYPGQQQGYGPSQGGPGPQYPNYPQGQGQQYGGYRPTQPGPPQPPQQRPYGYDQIMPKKPAEEENGLKEVPEASGPQNDGKQLCPPGNPSTLEKINKTSGPKRGKHAWTHRLRERKQLVVYEEISDPEEDDE

SEQ ID NO: 1142 - protein, 105 aa, Homo sapiens
MGDVEKGKKIFIMKCSQCHTVEKGGKHKTGPNLHGLFGRKTGQAPGYSYTAANKNKGIIWGEDTLMEYLENPKKYIPGTKMIFVGIKKKEERADLIAYLKKATNE

SEQ ID NO: 1143 - protein, 923 aa, Homo sapiens
MGSGAGELGRAERLPVLFLFLLSLFCPALCEQIRYRIPEEMPKGSVVGNLATDLGFSVQELPTRKLRVSSEKPYFTVSAESGELLVSSRLDREEICGKKPACALEFEAVAENPLNFYHVNVEIEDINDHTPKFTQNSFELQISESAQPGTRFILEVAEDADIGLNSLQKYKLSLNPSFSLIIKEKQDGSKYPELALEKTLDREQQSYHRLVLTALDGGHPPLSGTTELRIQVTDANDNPPVFNRDVYRVSLRENVPPGTTVLQVSATDQDEGINSEITYSFYRTGQIFSLNSKSGEITTQKKLDFEETKEYSMVVEGRDGGGLVAQCTVEINIQDENDNSPEVTFHSLLEMILENAVPGTLIALIKIHDQDSGENGEVNCQLQGEVPFKIISSSKNSYKLVTDGTLDREQTPEYNVTITATDRGKPPLSSSISVILHIRDVNDNAPVFHQASYLVSVPENNPPGASIAQVCASDLDLGLNGQVSYSIMASDLEPLALASYVSMSAQSGVVFAQRAFDYEQLRTFELTLQARDQGSPALSANVSLRVLVGDRNDNAPRVLYPALGPDGSALFDMVPRAAEPGYLVTKVVAVDADSGHNAWLSYHVLQASEPGLFSLGLRTGEVRTARALGDRDAARQRLLVAVRDGGQPPLSATATLHLVFADSLQEVLPDITDRPVPSDPQAELQFYLVVALALISVLFLLAVILAVALRLRRSSSPAAWSCFQPGLCVKSGPVVPPNYSQGTLPYSYNLCVAHTGKTEFNFLKCSEQLSSGQDILCGDSSGALFPLCNSSESTSHPELQAPPNTDWRFSQAQRPGTSGSQNGDDTGTWPNNQFDTEMLQAMILASASEAADGSSTLGGGAGTMGLSARYGPQFTLQHVPDYRQNVYIPGSNATLTNAAGKRDGKAPAGGNGNKKKSGKKEKK

SEQ ID NO: 1144 - protein, 216 aa, Homo sapiens
AAQCVRLARRSLPALALSLRPSPRLLCTATKQKNSGQNLEEDMGQSEQKADPPATEKTLLEEKVKLEEQLKETVEKYKRALADTENLRQRSQKLVEEAKLYGIQAFCKDLLEVADVLEKATQCVPKEEIKDDNPHLKNLYEGLVMTEVQIQKVFTKHGLLKLNPVGAKFDPYEHEALFHTPVEGKEPGTVALVSKVGYKLHGRTLRPALVGVVKEA

SEQ ID NO: 1145 - protein, 580 aa, Homo sapiens
MAFHVEGLIAIIVFYLLILLVGIWAAWRTKNSGSAEERSEAIIVGGRDIGLLVGGFTMTATWVGGGYINGTAEAVYVPGYGLAWAQAPIGYSLSLILGGLFFAKPMRSKGYVTMLDPFQQIYGKRMGGLLFIPALMGEMFWAAAIFSALGATISVIIDVDMHISVIISALIATLYTLVGGLYSVAYTDVVQLFCIFVGLWISVPFALSHPAVADIGFTAVHAKYQKPWLGTVDSSEVYSWLDSFLLLMLGGIPWQAYFQRVLSSSSATYAQVLSFLAAFGCLVMAIPAILIGAIGASTDWNQTAYGLPDPKTTEEADMILPIVLQYLCPVYISFFGLGAVSAAVMSSADSSILSASSMFARNIYQLSFRQNASDKEIVWVMRITVFVFGASATAMALLTKTVYGLWYLSSDLVYIVIFPQLLCVLFVKGTNTYGAVAGYVSGLFLRITGGEPYLYLQPLIFYPGYYPDDNGIYNQKFPFKTLAMVTSFLTNICISYLAKYLFESGTLPPKLDVFDAVVARHSEENMDKTILVKNENIKLDELALVKPRQSMTLSSTFTNKEAFLDVDSSPEGSGTEDNLQ

SEQ ID NO: 1146 - protein, 526 aa, Homo sapiens
MPAVSGPGPLFCLLLLLLDPHSPETGCPPLRRFEYKLSFKGPRLALPGAGIPFWSHHGDAILGLEEVRLTPSMRNRSGAVWSRASVPFSAWEVEVQMRVTGLGRRGAHGMAVWYTRGRGHVGSVLGGLASWDGIGIFFDSPAEDTQDSPAIRVLASDGHIPSEQPGDGASQGLGSCHWDFRNRPHPFRARITYWGQRLRMSLNSGLTPSDPGEFCVDVGPLLLVPGGFFGVSAATGTLADDHDVLSFLTFSLSEPSPEVPPQPFLEMQQLRLARQLEGLWARLGLGTREDVTPKSDSEAQGEGERLFDLEETLGRHRRILQALRGLSKQLAQAERQWKKQLGPPGQARPDGGWALDASCQIPSTPGRGGHLSMSLNKDSAKVGALLHGQWTLLQALQEMRDAAVRMAAEAQVSYLPVGIEHHFLELDHILGLLQEELRGPAKAAAKAPRPPGQPPRASSCLQPGIFLFYLLIQTVGFFGYVHFRQELNKSLQECLSTGSLPLGPAPHTPRALGILRRQPLPASMPA

SEQ ID NO: 1147 - protein, 198 aa, Homo sapiens [sequence omitted]

SEQ ID NO: 1148 - protein, 198 aa, Homo sapiens [sequence omitted]

SEQ ID NO: 1149 - protein, 765 aa, Homo sapiens
MSGDHLHNDSQIEADFRLNDSHKHKDKHKDREHRHKEHKKEKDREKSKHSNSEHKDSEKKHKEKEKTKHKDGSSEKHKDKHKDRDKEKRKEEKVRASGDAKIKKEKENGFSSPPQIKDEPEDDGYFVPPKEDIKPLKRPRDEDDADYKPKKIKTEDTKKEKKRKLEEEEDGKLKKPKNKDKDKKVPEPDNKKKKPKKEEEQKWKWWEEERYPEGIKWKFLEHKGPVFAPPYEPLPENVKFYYDGKVMKLSPKAEEVATFFAKMLDHEYTTKEIFRKNFFKDWRKEMTNEEKNIITNLSKCDFTQMSQYFKAQTEARKQMSKEEKLKIKEENEKLLKEYGFCIMDNHKERIANFKIEPPGLFRGRGNHPKMGMLKRRIMPEDIIINCSKDAKVPSPPPGHKWKEVRHDNKVTWLVSWTENIQGSIKYIMLNPSSRIKGEKDWQKYETARRLKKCVDKIRNQYREDWKSKEMKVRQRAVALYFIDKLALRAGNEKEEGETADTVGCCSLRVEHINLHPELDGQEYVVEFDFLGKDSIRYYNKVPVEKRVFKNLQLFMENKQPEDDLFDRLNTGILNKHLQDLMEGLTAKVFRTYNASITLQQQLKELTAPDENIPAKILSYNRANRAVAILCNHQRAPPKTFEKSMMNLQTKIDAKKEQLADARRDLKSAKADAKVMKDAKTKKVVESKKKAVQRLEEQLMKLEVQATDREENKQIALGTSKLNYLDPRITVAWCKKWGVPIEKIYNKTQREKFAWAIDMADEDYEF

SEQ ID NO: 1150 - protein, 1165 aa, Homo sapiens
MQDVQGPRPGSPGDAEDRRELGLHRGEVNFGGSGKKRGKFVRVPSGVAPSVLFDLLLAEWHLPAPNLVVSLVGEEQPFAMKSWLRDVLRKGLVKAAQSTGAWILTSALRVGLARHVGQAVRDHSLASTSTKVRVVAVGMASLGRVLHRRILEEAQEDFPVHYPEDDGGSQGPLCSLDSNLSHFILVEPGPPGKGDGLTELRLRLEKHISEQRAGYGGTGSIEIPVLCLLVNGDPNTLERISRAVEQAAPWLILVGSGGIADVLAALVNQPHLLVPKVAEKQFKEKFPSKHFSWEDIVRWTKLLQNITSHQHLLTVYDFEQEGSEELDTVILKALVKACKSHSQEPQDYLDELKLAVAWDRVDIAKSEIFNGDVEWKSCDLEEVMVDALVSNKPEFVRLFVDNGADVADFLTYGRLQELYRSVSRKSLLFDLLQRKQEEARLTLAGLGTQQAREPPAGPPAFSLHEVSRVLKDFLQDACRGFYQDGRPGDRRRAEKGPAKRPTGQKWLLDLNQKSENPWRDLFLWAVLQNRHEMATYFWAMGQEGVAAALAACKILKEMSHLETEAEAARATREAKYERLALDLFSECYSNSEARAFALLVRRNRCWSKTTCLHLATEADAKAFFAHDGVQAFLTRIWWGDMAAGTPILRLLGAFLCPALVYTNLITFSEEAPLRTGLEDLQDLDSLDTEKSPLYGLQSRVEELVEAPRAQGDRGPRAVFLLTRWRKFWGAPVTVFLGNVVMYFAFLFLFTYVLLVDFRPPPQGPSGPEVTLYFWVFTLVLEEIRQGFFTDEDTHLVKKFTLYVGDNWNKCDMVAIFLFIVGVTCRMLPSAFEAGRTVLAMDFMVFTLRLIHIFAIHKQLGPKIIVVERMMKDVFFFLFFLSVWLVAYGVTTQALLHPHDGRLEWIFRRVLYRPYLQIFGQIPLDEIDEARVNCSTHPLLLEDSPSCPSLYANWLVILLLVTFLLVTNVLLMNLLIAMFSYTFQVVQGNADMFWKFQRYNLIVEYHERPALAPPFILLSHLSLTLRRVFKKEAEHKREHLERDLPDPLDQKVVTWETVQKENFLSKMEKRRRDSEGEVLRKTAHRVDFIAKYLGGLREQEKRIKCLESQINYCSVLVSSVADVLAQGGGPRSSQHCGEGSQLVAADHRGGLDGWEQPGAGQPPSDT

SEQ ID NO: 1151 - protein, 2041 aa, Homo sapiens
MDEVEQDQHEARLKELFDSFDTTGTGSLGQEELTDLCHMLSLEEVAPVLQQTLLQDNLLGRVHFDQFKEALILILSRTLSDEEHFQEPDCSLEAQPRYVRGEKPYGRRSLPEFQESVEEFPEVTVIEPLDEEARPSHIPAGDCSEHWKTQRSEEYEAEGQLRFWNPDDLNASQSGSSPPQDWIEEKLQQVCEDLGITPDGHLNRKKLVSICEQYGLQNVDGEMLEEVFHNLDPDGTMSVEDFFYGLFKNGKSLTPSASTPYRQLKRHLSMQSFDESGRRTTTSSATTSTIGFRVFSCLDDGMGHASVERILDTWQEEGIENSQEILKALDFSLDGNINLTELTLALENELLVTKNSIHQAALASFKAEIRHLLERVDQVVREKRSYGQIWTSEKLKSLMASEVDDHHAAIERRNEYNLRKLDEEYKERIAALKNELRKEREQILQQAGKQRLELEQEIEKAKTEENYIRDRLALSLKENSRLENELLENAEKLAEYENLTNKLQRNLENVLAEKFGDLDPSSAEFFLQEERLTQMRNEYERQCRVLQDQVDELQSELEEYRAQGRVLRLPLKNSPSEEVEANSGGIEPEHGLGSEECNPLNMSIEAELVIEQMKEQHHRDICCLRLELEDKVRHYEKQLDETVVSCKKAQENMKQRHENETHTLEEQISDLKMKIAELQGQAAVLKEAHHEATCRHEEEKKQLQVKLEEEKTHLQEKLRLQHEMELKARLTQAQASFGREREGLQSSAWTEEKVRGLTQELEQFHQEQLTSLVEKHTLEKEELRKELLEKHQRELQEGREKMETECNRRTSQIEAQFQSDCQKVTERCESALQSLEGRYRQELKDLQEQQREEKSQWEFEKDELTQECAEAQELLKETLKREKTTSLVLTQEREMLEKTYKDHLNSMVVERQQLLQDLEDLRNVSETQQSLLSDQILELKSSHKRELREREEVLCQQGVSEQLASQRLERLEMEHDQERQEMMSKLLAMENIHKATCETADRERAEMSTEISRLQSKIKEMQQATSPLSMLQSGCQVIGEEEVEGDGALSLLQKGEQLLEENGDVLLSLQRAHEQAVKENVKMATEISRLQQRLQKLEPGLVMSSCLDEPATEFFGNTAEQTEPFLQQNRTKQVEGVTRRHVLSDLEDDEVRDLGSTGTSSVQRQEVKIEESEASVEGFSELENSEETRTESWELKNHISLLQEQLMMFCADCDLASEKKQELLFDVSVLKKKLKILERIPEASPRYKLLYEDVSRENDCLQEELEMMETRYDEALENNKELTAEVFRLQDELKKMEEVTETFLSLEKSYDEVKIENEELNVLVLRLQGKIEKLHESVVKRCDCCLWEGSLENLEIEPDGNILQLNQTLEECVPRVRSVHHVIEECKQENQYLEGNTQLLEKVKAHEIAWFHGTIQTHHERPRVQNQFILEENTTLLGFQNKHFQHQATLPNLELEKQNFQELTRNLREKFPILIYQKNFLSPGKKEEELKAMMHDLQIPCSEMQQKVELLKYESEKLHQENSFLRNEITTLNEEDSISNLKLGTLNGSQEEMWQKTESVKQENAAVLKMVENLKKQISELKIKNQQLDLENTELSQKNSPNQEKLQELNQLLTEMLCQKEKEPGNSALEEREQEKFNLKEEPERCKVQSSTLVSSLEAELSEVNYRTPIVQQENPLLQDELEKMKQLHRCPDLSNFQQKISSVLSYNEKLLKEKEALSEELNSCVDKLAKSSLLEHRIATMKQEQKSWEHQSASLKTQLVASQEKVQNLEDTVQNVNLQMSRMKSDPRVTQQEKEALKQEVMPLHKQLQNSVARAGPREIDHPSGFHNQQKRLSWDKLDYLMNEEQQLFCKENERFQTMVQNTKAELTHSREKFRQLESNLLPKHQKYLNPSGTMNPTEQEKLSLKRECDQFQKEQSPANRKVSQMNSLEQELKTIHLENEGLKKKQVKLDEQLMEMQHLRSTATPSPSPHAWDLQLLQQQACRMVPREQFLRFKPQLLQAERISQHLQGEFENRTSETNTPRGNREQLVTVMGGTNDRS

SEQ ID NO: 1152 - protein, 438 aa, Homo sapiens [sequence omitted]

SEQ ID NO: 1153 - protein, 438 aa, Homo sapiens [sequence omitted]

SEQ ID NO: 1154 - protein, 819 aa, Homo sapiens
MAEVEDQAARDMKRLEEKDKERKNVKGIRDDIEEEDDQEAYFRYMAENPTAGVVQEEEEDNLEYDSDGNPIAPTKKIIDPLPPIDHSEIDYPPFEKNFYNEHEEITNLTPQQLIDLRHKLNLRVSGAAPPRPGSSFAHFGFDEQLMHQIRKSEYTQPTPIQCQGVPVALSGRDMIGIAKTGSGKTAAFIWPMLIHIMDQKELEPGDGPIAVIVCPTRELCQQIHAECKRFGKAYNLRSVAVYGGGSMWEQAKALQEGAEIVVCTPGRLIDHVKKKATNLQRVSYLVFDEADRMFDMGFEYQVRSIASHVRPDRQTLLFSATFRKKIEKLARDILIDPIRVVQGDIGEANEDVTQIVEILHSGPSKWNWLTRRLVEFTSSGSVLLFVTKKANAEELANNLKQEGHNLGLLHGDMDQSERNKVISDFKKKDIPVLVATDVAARGLDIPSIKTVINYDVARDIDTHTHRIGRTGRAGEKGVAYTLLTPKDSNFAGDLVRNLEGANQHVSKELLDLAMQNAWFRKSRFKGGKGKKLNIGGGGLGYRERPGLGSENMDRGNNNVMSNYEAYKPSTGAMGDRLTAMKAAFQSQYKSHFVAASLSNQKAGSSAAGASGWTSAGSLNSVPTNSAQQGHNSPDSPVTSAAKGIPGFGNTGNISGAPVTYPSAGAQGVNNTASGNNSREGTGGSNGKRERYTENRGSSRHSHGETGNRHSDSPRHGDGGRHGDGYRHPESSSRHTDGHRHGENRHGGSAGRHGENRGANDGRNGESRKEAFNRESKMEPKMEPKVDSSKMDKVDSKTDKTADGFAVPEPPKRKKSRWDS

SEQ ID NO: 1155 - protein, 1594 aa, Homo sapiens
MGAPSACRTLVLALAAMLVVPQAETQGPVEPSWGNAGHTMDGGAPTSSPTRRVSFVPPVTVFPSLSPLNPAHNGRVCSTWGDFHYKTFDGDVFRFPGLCNYVFSEHCRAAYEDFNVQLRRGLVGSRPVVTRVVIKAQGLVLKASNGSVLINGQREELPYSRTGLLVEQSGDYIKVSIRLVLTFLWNGEDSALLELDPKYANQTCGLCGDFNGLPAFNEFYAHNARLTPLQFGNLQKLDGPTEQCPDPLPLPAGNCTDEEGICHRTLLGPAFAECHALVDSTAYLAACAQDLCRCPTCPCATFVEYSRQCAHAGGQPRNWRCPELCPRTCPLNMQHQECGSPCTDTCSNPQRAQLCEDHCVDGCFCPPGSTVLDDITHSGCLPLGQCPCTHGGRTYSPGTSFNTTCSSCTCSGGLWQCQDLPCPGTCSVQGGAHISTYDEKLYDLHGDCSYVLSKKCADSSFTVLAELRKCGLTDNENCLKAVTLSLDGGDTAIRVQADGGVFLNSIYTQLPLSAANITLFTPSSFFIVVQTGLGLQLLVQLVPLMQVFVRLDPAHQGQMCGLCGNFNQNQADDFTALSGVVEATGAAFANTWKAQAACANARNSFEDPCSLSVENENYARHWCSRLTDPNSAFSRCHSIINPKPFHSNCMFDTCNCERSEDCLCAALSSYVHACAAKGVQLSDWRDGVCTKYMQNCPKSQRYAYVVDACQPTCRGLSEADVTCSVSFVPVDGCTCPAGTFLNDAGACVPAQECPCYAHGTVLAPGEVVHDEGAVCSCTGGKLSCLGASLQKSTGCAAPMVYLDCSNSSAGTPGAECLRSCHTLDVGCFSTHCVSGCVCPPGLVSDGSGGCIAEEDCPCVHNEATYKPGETIRVDCNTCTCRNRRWECSHRLCLGTCVAYGDGHFITFDGDRYSFEGSCEYILAQDYCGDNTTHGTFRIVTENIPCGTTGTTCSKAIKLFVESYELILQEGTFKAVARGPGGDPPYKIRYMGIFLVIETHGMAVSWDRKTSVFIRLHQDYKGRVCGLCGNFDDNAINDFATRSRSVVGDALEFGNSWKLSPSCPDALAPKDPCTANPFRKSWAQKQCSILHGPTFAACRSQVDSTKYYEACVNDACACDSGGDCECFCTAVAAYAQACHDAGLCVSWRTPDTCPLFCDFYNPHGGCEWHYQPCGAPCLKTCRNPSGHCLVDLPGLEGCYPKCPPSQPFFNEDQMKCVAQCGCYDKDGNYYDVGARVPTAENCQSCNCTPSGIQCAHSLEACTCTYEDRTYSYQDVIYNTTDGLGACLIAICGSNGTIIRKAVACPGTPATTPFTFTTAWVPHSTTSPALPVSTVCVREVCRWSSWYNGHRPEPGLGGGDFETFENLRQRGYQVCPVLADIECRAAQLPDMPLEELGQQVDCDRMRGLMCANSQQSPPLCHDYELRVLCCEYVPCGPSPAPGTSPQPSLSASTEPAVPTPTQTTATEKTTLWVTPSIRSTAALTSQTGSSSGPVTVTPSAPGTTTCQPRCQWTEWFDEDYPKSEQLGGDVESYDKIRAAGGHLCQQPKDIECQAESFPNWTLAQVGQKVHCDVHFGLVCRNWEQEGVFKMCYNYRI

SEQ ID NO: 1156 - protein, 601 aa, Homo sapiens
MKLDIEQYRMVKEALHERANLLEIAPHLSAPLPIMLPVYKWWQLPYYWVGIKLYDLVAGSNCLKSSYVLSKSRALEHFPMLQKDKLVGAIVYYDGQHNDARMNLAIALTAARYGAATANYMEVVSLLKKTDPQTGKVHVSGARCKDVLTGQEFDVRAKCVINATGPFTDSVRKMDDKDAAAICQPSAGVHIVMPGYYSPESMGLLDPATSDGRVIFFLPWQKMTIAGTTDTPTDVTHHPIPSEEDINFILNEVRNYLSCDVEVRRGDVLAAWSGIRPLVTDPKSADTQSISRNHVVDISESGLITIAGGKWTTYRSMAEDTINAAVKTHNLKAGPSRTVGLFLQGGKDWSPTLYIRLVQDYGLESEVAQHLAATYGDKAFEVAKMASVTGKRWPIVGVHLVSEFPYIEAEVKYGIKEYACTAVDMISRRTRLAFLNVQAAEEALPRIVELMGRELNWDDYKKQEQLETARKFLYYEMGYKSRSEQLTDRSEISLLPSDIDRYKKRFHKFDADQKGFITIVDVQRVLESINVQMDENTLHEILNEVDLNKNGQVELNEFLQLMSAIQKGRVSGSRLAILMKTAEENLDRRVPIPVDRSCGGL

SEQ ID NO: 1157 - protein, 698 aa, Homo sapiens
MQAHELFRYFRMPELVDFRQYVRTLPTNTLMGFGAFAALTTFWYATRPKPLKPPCDLSMQSVEVAGSGGARRSALLDSDEPLVYFYDDVTTLYEGFQRGIQVSNNGPCLGSRKPDQPYEWLSYKQVAELSECIGSALIQKGFKTAPDQFIGIFAQNRPEWVIIEQGCFAYSMVIVPLYDTLGNEAITYIVNKAELSLVFVDKPEKAKLLLEGVENKLIPGLKIIVVMDAYGSELVERGQRCGVEVTSMKAMEDLGRANRRKPKPPAPEDLAVICFTSGTTGNPKGAMVTHRNIVSDCSAFVKATENTVNPCPDDTLISFLPLAHMFERVVECVMLCHGAKIGFFQGDIRLLMDDLKVLQPTVFPVVPRLLNRMFDRIFGQANTTLKRWLLDFASKRKEAELRSGIIRNNSLWDRLIFHKVQSSLGGRVRLMVTGAAPVSATVLTFLRAALGCQFYEGYGQTECTAGCCLTMPGDWTAGHVGAPMPCNLIKLVDVEEMNYMAAEGEGEVCVKGPNVFQGYLKDPAKTAEALDKDGWLHTGDIGKWLPNGTLKIIDRKKHIFKLAQGEYIAPEKIENIYMRSEPVAQVFVHGESLQAFLIAIVVPDVETLCSWAQKRGFEGSFEELCRNKDVKKAILEDMVRLGKDSGLKPFEQVKGITLHPELFSIDNGLLTPTMKAKRPELRNYFRSQIDDLYSTIKV

SEQ ID NO: 1158 - protein, 698 aa, Homo sapiens; identical to SEQ ID NO: 1157

SEQ ID NO: 1159 - protein, 115 aa, Homo sapiens [sequence omitted]

SEQ ID NO: 1160 - protein, 630 aa, Homo sapiens
GRVGGRVGAAGSTRSTAGAGLGQRLRCCWIVVFSGIEDTHQKPKMPKPINVRVTTMDAELEFAIQPNTTGKQLFDQVVKTIGLREVWYFGLHYVDNKGFPTWLKLDKKVSAQEVRKENPLQFKFRAKFYPEDVAEELIQDITQKLFFLQVKEGILSDEIYCPPETAVLLGSYAVQAKFGDYNKEVHKSGYLSSERLIPQRVMDQHKLTRDQWEDRIQVWHAEHRGMLKDNAMLEYLKIAQDLEMYGINYFEIKNKKGTDLWLGVDALGLNIYEKDDKLTPKIGFPWSEIRNISFNDKKFVIKPIDKKAPDFVFYAPRLRINKRILQLCMGNHELYMRRRKPDTIEVQQMKAQAREEKHQKQLERQQLETEKKRRETVEREKEQMMREKEELMLRLQDYEEKTKKAERELSEQIQRALQLEEERKRAQEEAERLEADRMAALRAKEELERQAVDQIKSQEQLAAELAEYTAKIALLEEARRRKEDEVEEWQHRAKEAQDDLVKTKEELHLVMTAPPPPPPPVYEPVSYHVQESLQDEGAEPTGYSAELSSEGIRDDRNEEKRITEAEKNERVQRQLLTLSSELSQARDENKRTHNDIIHNENMRQGRDKYKTLRQIRQGNTKQRIDEFEAL

SEQ ID NO: 1161 - protein, 737 aa, Homo sapiens [sequence omitted]

SEQ ID NO: 1162 - protein, 952 aa, Homo sapiens
ENKSKWTCTQSSISPQYNICEQMVQIRDDHIRFISELARYSNSEVVTGSGLDSQKSDEEYRELFDLALRGLQLLSKWSAHVMEVYSWKLVHPTDKFCNKDCPGTAEEYERATRYNYTSEEKFAFVEVIAMIKGLQVLMGRMESVFNQAIRNTIYAALQDFAQVTLREPLRQAVRKKKNVLISVLQAIRKTICDWEGGREPPNDPCLRGEKDPKGGFDIKVPRRAVGPSSTQACQWSPRALFHPTGGTQGRRGCRSLLYMVRTMLESLIADKSGSKKTLRSSLDGPIVLAIEDFHKQSFFFTHLLNISEALQQCCDLSQLWFREFFLELTMGRRIQFPIEMSMPWILTDHILETKEPSMMEYVLYPLDLYNDSAYYALTKFKKQFLYDEIEAEVNLCFDQFVYKLADQIFAYYKAMAGSVLLDKRFRAECKNYGVIIPYPPSNRYETLLKQRHVQLLGRSIDLNRLITQRISAAMYKSLDQAISRFESEDLTSIVELEWLLEINRLTHRLLCKHMTLDSFDAMFREANHNVSAPYGRITLHVFWELNFDFLPNYCYNGSTNRFVRTAIPFTQEPQRDKPANVQPYYLYGSKPLNIAYSHIYSSYRNFVGPPHFKTICRLLGYQGIAVVMEELLKIVKSLLQGTILQYVKTLIEVMPKICRLPRHEYGSPGILEFFHHQLKDIIEYAELKTDVFQSLREVGNAILFCLLIEQALSQEEVCDLLHAAPFQNILPRVYIKEGERLEVRMKRLEAKYAPLHLVPLIERLGTPQQIAIAREGDLLTKERLCCGLSMFEVILTRIRSYLQDPIWRGPPPTNGVMHVDECVEFHRLWSAMQFVYCIPVGTNEFTAEQCFGDGLNWAGCSIIVLLGQQRRFDLFDFCYHLLKVQRQDGKDEIIKNVPLKKMADRIRKYQILNNEVFAILNKYMKSVETDSSTVEHVRCFQPPIHQSLATTC

SEQ ID NO: 1163 - protein, 184 aa, Homo sapiens
MVSKLLLTIQLCPKTEFQPSEKFGEDLSDNTWEYIFAIDLLCCHQKWIWTHDNIISKELWPVMDKWIKYRKGHANIAYTPDIIIASILRLIGRLGQLGLKEGFPSAVKNISSVIGMFIQHAHDEDIPWGIQLAAVYALCDLSPSNPAEISKILEAWRREASKSVPSAIVSCLEEVSALSTEELG

SEQ ID NO: 1164 - protein, 348 aa, Homo sapiens
MIPLLLAALLCVPAGALTCYGDSGQPVDWFVVYKLPALRGSGEAAQRGLQYKYLDESSGGWRDGRALINSPEGAVGRSLQPLYRSNTSQLAFLLYNDQPPQPSKAQDSSMRGHTKGVLLLDHDGGFWLVHSVPNFPPPASSAAYSWPHSACTYGQTLLCKQLTYTYPWVYNYQLEGIFAQEFPDLENVVKGHHVSQEPWNSSITLTSQAGAVFQSFAKFSKFGDDLYSGWLAAALGTNLQVQFWHKTVGILPSNCSDIWQVLNVNQIAFPGPAGPSFNSTEDHSKWCVSPKGPWTCVGDMNRNQGEEQRGGGTLCAQLPALWKAFQPLVKNYQPCNGMARKPSRAYKI

SEQ ID NO: 1165 - protein, 919 aa, Homo sapiens
MAADVFMCSPRRPRSRGRQVLLKPQVSEDDDDSDTDEPSPPPASGAATPARAHASAAPPPPRAGPGREEPPRRQQIIHSGHFMVSSPHREHPPKKGYDFDTVNKQTCQTYSFGKTSSCHLSIDASLTKLFECMTLAYSGKLVSPKWKNFKGLKLQWRDKIRLNNAIWRAWYMQYLEKRKNPVCHFVTPLDGSVDVDEHRRPEAITTEGKYWKSRIEIVIREYHKWRTYFKKRLQQHKDEDLSSLVQDDDMLYWHKHGDGWKTPVPMEEDPLLDTDMLMSEFSDTLFSTLSSHQPVAWPNPREIAHLGNADMIQPGLIPLQPNLDFMDTFEPFQDLFSSSRSIFGSMLPASASAPVPDPNNPPAQESILPTTALPTVSLPDSLIAPPTAPSLAHMDGQGCEHTSRTEDPFIQPTDFGPSEPPLSVPQPFLPVFTMPLLSPSPAPPPISPVLPLVPPPATALNPPAPPTFHQPQKFAGVNKAPSVITHTASATLTHDAPATTFSQSQGLVITTHHPAPSAAPCGLALSPVTRPPQPRLTFVHPKPVSLTGGRPKQPHKIVPAPKPEPVSLVLKNARIAPAAFSGQPQAVIMTSGPLKREGMLASTVSQSNVVIAPAAIARAPGVPEFHSSILVTDLGHGTSSPPAPVSRLFPSTAQDPLGKGEQVPLHGGSPQVTVTGPSRDCPNSGQASPCASEQSPSPQSPQNNCSGKSDPKNVAALKNRQMKHISAEQKRRFNIKMCFDMLNSLISNNSKLTSHAITLQKTVEYITKLQQERGQMQEEARRLREEIEELNATIISCQQLLPATGVPVTRRQFDHMKDMFDEYVKTRTLQNWKFWIFSIIIKPLFESFKGMVSTSSLEELHRTALSWLDQHCSLPILRPMVLSTLRQLSTSTSILTDPAQLPEQASKAVTRIGKRLGES

SEQ ID NO: 1166 - protein, 315 aa, Homo sapiens
MEPEAGTNRTAVAEFILLGLVQTEEMQPVVFVLLLFAYLVTTGGNLSILAAVLVEPKLHAPMYFFLGNLSVLDVGCITVTVPAMLGRLLSHKSTISYDACLSQLFFFHLLAGMDCFLLTAMAYDRLLAICQPLTYSTRMSQTVQRMLVAASLACAFTNALTHTVAMSTLNFCGPNEVNHFYCDLPQLFQLSCSSTQLNELLLFAVGFIMAGTPLVLIITAYSHVAAAVLRIRSVEGRKKAFSTCGSHLTVVCLFFGRGIFNYMRLGSEEASDKDKGVGVFNTVINPMLNPLIYSLRNPDVQGALWQIFLGRRSLT

SEQ ID NO: 1167 - protein, 1523 aa, Homo sapiens
MAPGWAGVGAAVRARLALALALASVLSGPPAVACPTKCTCSAASVDCHGLGLRAVPRGIPRNAERLDLDRNNITRITKMDFAGLKNLRVLHLEDNQVSVIERGAFQDLKQLERLRLNKNKLQVLPELLFQSTPKLTRLDLSENQIQGIPRKAFRGITDVKNLQLDNNHISCIEDGAFRALRDLEILTLNNNNISRILVTSFNHMPKIRTLRLHSNHLYCDCHLAWLSDWLRQRRTVGQFTLCMAPVHLRGFNVADVQKKEYVCPAPHSEPPSCNANSISCPSPCTCSNNIVDCRGKGLMEIPANLPEGIVEIRLEQNSIKAIPAGAFTQYKKLKRIDISKNQISDIAPDAFQGLKSLTSLVLYGNKITEIAKGLFDGLVSLQLLLLNANKINCLRVNTFQDLQNLNLLSLYDNKLQTISKGLFAPLQSIQTLHLAQNPFVCDCHLKWLADYLQDNPIETSGARCSSPRRLANKRISQIKSKKFRCSGSEDYRSRFSSECFMDLVCPEKCRCEGTIVDCSNQKLVRIPSHLPEYVTDLRLNDNEVSVLEATGIFKKLPNLRKINLSNNKIKEVREGAFDGAASVQELMLTGNQLETVHGRVFRGLSGLKTLMLRSNLIGCVSNDTFAGLSSVRLLSLYDNRITTITPGAFTTLVSLSTINLLSNPFNCNCHLAWLGKWLRKRRIVSGNPRCQKPFFLKEIPIQDVAIQDFTCDGNEESSCQLSPRCPEQCTCMETVVRCSNKGLRALPRGMPKDVTELYLEGNHLTAVPRELSALRHLTLIDLSNNSISMLTNYTFSNMSHLSTLILSYNRLRCIPVHAFNGLRSLRVLTLHGNDISSVPEGSFNDLTSLSHLALGTNPLHCDCSLRWLSEWVKAGYKEPGIARCSSPEPMADRLLLTTPTHRFQCKGPVDINIVAKCNACLSSPCKNNGTCTQDPVELYRCACPYSYKGKDCTVPINTCIQNPCQHGGTCHLSDSHKDGFSCSCPLGFEGQRCEINPDDCEDNDCENNATCVDGINNYVCICPPNYTGELCDEVIDHCVPELNLCQHEAKCIPLDKGFSCECVPGYSGKLCETDNDDCVAHKCRHGAQCVDTINGYTCTCPQGFSGPFCEHPPPMVLLQTSPCDQYECQNGAQCIVVQQEPTCRCPPGFAGPRCEKLITVNFVGKDSYVELASAKVRPQANISLQVATDKDNGILLYKGDNDPLALELYQGHVRLVYDSLSSPPTTVYSVETVNDGQFHSVELVTLNQTLNLVVDKGTPKSLGKLQKQPAVGINSPLYLGGIPTSTGLSALRQGTDRPLGGFHGCIHEVRINNELQDFKALPPQSLGVSPGCKSCTVCKHGLCRSVEKDSVVCECRPGWTGPLCDQEARDPCLGHRCHHGKCVATGTSYMCKCAEGYGGDLCDNKNDSANACSAFKCHHGQCHISDQGEPYCLCQPGFSGEHCQQENPCLGQVVREVIRRQKGYASCATASKVPIMECRGGCGPQCCQPTRSKRRKYVFQCTDGSSFVEEVERHLECGCLACS

SEQ ID NO: 1168 - protein, 1938 aa, Homo sapiens
MSSDAEMAIFGEAAPYLRKPEKERIEAQNRPFDSKKACFVADNKEMYVKGMIQTRENDKVIVKTLDDRMLTLNNDQVFPMNPPKFDKIEDMAMMTHLHEPAVLYNLKERYAAWMIYTYSGLFCVTVNPYKWLPVYKPEVVAAYRGKKRQEAPPHIFSISDNAYQFMLTDRDNQSILITGESGAGKTVNTKRVIQYFATIAVTGDKKKETQPGKMQGTLEDQIIQANPLLEAFGNAKTVRNDNSSRFGKFIRIHFGATGKLASADIETYLLEKSRVTFQLSSERSYHIFYQIMSNKKPELIDLLLISTNPFDFPFVSQGEVTVASIDDSEELLATDNAIDILGFSSEEKVGIYKLTGAVMHYGNMKFKQKQREEQAEPDGTEVADKAGYLMGLNSAEMLKGLCCPRVKVGNEYVTKGQNVQQVTNSVGALAKAVYEKMFLWMVTRINQQLDTKQPRQYFIGVLDIAGFEIFDFNSLEQLCINFTNEKLQQFFNHHMFVLEQEEYKKEGIEWEFIDFGMDLAACIELIEKPMGIFSILEEECMFPKATDTSFKNKLYDQHLGKSNNFQKPKPAKGKAEAHFSLVHYAGTVDYNIAGWLDKNKDPLNETVVGLYQKSSLKLLSFLFSNYAGAETGDSGGSKKGGKKKGSSFQTVSAVFRENLNKLMTNLRSTHPHFVRCLIPNETKTPGVMDHYLVMHQLRCNGVLEGIRICRKGFPSRILYADFKQRYRILNASAIPEGQFIDSKNASEKLLNSIDVDREQFRFGNTKVFFKAGLLGLLEEMRDEKLVTLMTSTQAVCRGYLMRVEFKKMMERRDSIFCIQYNIRSFMNVKHWPWMNLFFKIKPLLKSAEAEKEMATMKEDFERTKEELARSEARRKELEEKMVSLLQEKNDLQLQVQSETENLMDAEERCEGLIKSKILLEAKVKELTERLEEEEEMNSELVAKKRNLEDKCSSLKRDIDDLELTLTKVEKEKHATENKVKNLSEEMTALEENISKLTKEKKSLQEAHQQTLDDLQVEEDKVNGLIKINAKLEQQTDDLEGSLEQEKKLRADLERAKRKLEGDLKMSQESIMDLENEKQQIEEKLKKKEFELSQLQARIDDEQVHSLQFQKKIKELQARIEELEEEIEAEHTLRAKIEKQRSDLARELEEISERLEEASGATSAQIEMNKKREAEFQKMRRDLEEATLQHEATAATLRKKQADSVAELGEQIDNLQRVKQKLEKEKSELKMEIDDMASNIEALSKSKSNIERTCRTVEDQFSEIKAKDEQQTQLIHDLNMQKARLQTQNGELSHRVEEKESLISQLTKSKQALTQQLEELKRQMEEETKAKNAMAHALQSSRHDCDLLREQYEEEQEAKAELQRALSKANSEVAQWKTKYETDAIQRTEELEEAKKKLAQRLQEAEEKTETANSKCASLEKTKQRLQGEVEDLMRDLERSHTACATLDKKQRNFDKVLAEWKQKLDESQAELEAAQKESRSLSTELFKMRNAYEEVVDQLETLRRENKNLQEEISDLTEQIAETGKNLQEAEKTKKLVEQEKSDLQVALEEVEGSLEHEESKILRVQLELSQVKSELDRKVIEKDEEIEQLKRNSQRAAEALQSVLDAEIRSRNDALRLKKKMEGDLNEMEIQLGHSNRQMAETQRHLRTVQGQLKDSQLHLDDALRSNEDLKEQLAIVERRNGLLLEELEEMKVALEQTERTRRLSEQELLDASDRVQLLHSQNTSLINTKKKLEADIAQCQAEVENSIQESRNAEEKAKKAITDAAMMAEELKKEQDTSAHLERMKKNLEQTVKDLQHRLDEAEQLALKGGKKQIQKLENRVRELENELDVEQKRGAEALKGAHKYERKVKEMTYQAEEDRKNILRLQDLVDKLQAKVKSYKRQAEEAEEQANTQLSRCRRVQHELEEAAERADIAESQVNKLRAKSRDVGSQKMEE

SEQ ID NO: 1169 - protein, 333 aa, Homo sapiens
MVSGSSGLAAARLLSRSFLLPQNGIRHCSYTASRQHLYVDKNTKIICQGFTGKQGTFHSQQALEYGTKLVGGTLPGKGGQTHLGLPVFNTVKEAKEQTGATASVIYVPPPFAAAAINEAIEAEIPLVVCITEGIPQQDMVRVKHKLLRQEKTRLIGPNCPGVINPGECKIGIMPGHIHKKGRIGIVSRSGTLTYEAVHQTTQVGLGQSLCVGIGGDPFNGTDFIDCLEIFLNDSATEGIILIGEIGGNAEENAAEFLKQHNSGPNSKPVVSFIAGLTAPPGRRMGHAGAIIAGGKGGAKEKISALQSAGVVVSMSPAQLGTTIYKEFEKRKML

SEQ ID NO: 1170 - protein, 463 aa, Homo sapiens
MAASMFYGRLVAVATLRNHRPRTAQRAAAQVLGSSGLFNNHGLQVQQQQQRNLSLHEYMSMELLQEAGVSVPKGYVAKSPDEAYAIAKKLGSKDVVIKAQVLAGGRGKGTFESGLKGGVKIVFSPEEAKAVSSQMIGKKLFTKQTGEKGRICNQVLVCERKYPRREYYFAITMERSFQGPVLIGSSHGGVNIEDVAAESPEAIIKEPIDIEEGIKKEQALQLAQKMGFPPNIVESAAENMVKLYSLFLKYDATMIEINPMVEDSDGAVLCMDAKINFDSNSAYRQKKIFDLQDWTQEDERDKDAAKANLNYIGLDGNIGCLVNGAGLAMATMDIIKLHGGTPANFLDVGGGATVHQVTEAFKLITSDKKVLAILVNIFGGIMRCDVIAQGIVMAVKDLEIKIPVVVRLQGTRVDDAKALIADSGLKILACDDLDEAARMVVKLSEIVTLAKQAHVDVKFQLPI

SEQ ID NO: 1171 - protein, 331 aa, Homo sapiens
MRFRFGVVVPPAVAGARPELLVVGSRPELGRWEPRGAVRLRPAGTAAGDGALALQEPGLWLGEVELAAEEAAQDGAEPGRVDTFWYKFLKREPGGELSWEGNGPHHDRCCTYNENNLVDGVYCLPIGHWIEATGHTNEMKHTTDFYFNIAGHQAMHYSRILPNIWLGSCPRQVEHVTIKLKHELGITAVMNFQTEWDIVQNSSGCNRYPEPMTPDTMIKLYREEGLAYIWMPTPDMSTEGRVQMLPQAVCLLHALLEKGHIVYVHCNAGVGRSTAAVCGWLQYVMGWNLRKVQYFLMAKRPAVYIDEEALARAQEDFFQKFGKVRSSVCSL

SEQ ID NO: 1172 - protein, 722 aa, Homo sapiens [sequence omitted]

SEQ ID NO: 1173 - protein, 147 aa, Homo sapiens
MAATTGSGVKVPRNFRLLEELEEGQKGVGDGTVSWGLEDDEDMTLTRWTGMIIGPPRTIYENRIYSLKIECGPKYPEAPPFVRFVTKINMNGVNSSNGVVDPRAISVLAKWQNSYSIKVVLQELRRLMMSKENMKLPQPPEGQCYSN

SEQ ID NO: 1174 - protein, 619 aa, Homo sapiens
LVGEPLPSQVPPGCCPRAPGRPPPGRGAAAAGAGNRAAVAVAVARADEAEAPFAGQNWLKSYGYLLPYDSRASALHSAKALQSAVSTMQQFYGIPVTGVLDQTTIEWMKKPRCGVPDHPHLSRRRRNKRYALTGQKWRQKHITYSIHNYTPKVGELDTRKAIRQAFDVWQKVTPLTFEEVPYHEIKSDRKEADIMIFFASGFHGDSSPFDGEGGFLAHAYFPGPGIGGDTHFDSDEPWTLGNANHDGNDLFLVAVHELGHALGLEHSSDPSAIMAPFYQYMETHNFKLPQDDLQGIQKIYGPPAEPLEPTRPLPTLPVRRIHSPSERKHERQPRPPRPPLGDRPSTPGTKPNICDGNFNTVALFRGEMFVFKDRWFWRLRNNRVQEGYPMQIEQFWKGLPARIDAAYERADGRFVFFKGDKYWVFKEVTVEPGYPHSLGELGSCLPREGIDTALRWEPVGKTYFFKGERYWRYSEERRATDPGYPKPITVWKGIPQAPQGAFISKEGYYTYFYKGRDYWKFDNQKLSVEPGYPRNILRDWMGCNQKEVERRKERRLPQDDVDIMVTINDVPGSVNAVAVVIPCILSLCILVLVYTIFQFKNKTGPQPVTYYKRPVQEWV

SEQ ID NO: 1175 - protein, 1940 aa, Homo sapiens
MSSDTEMEVFGIAAPFLRKSEKERIEAQNQPFDAKTYCFVVDSKEEYAKGKIKSSQDGKVTVETEDNRTLVVKPEDVYAMNPPKFDRIEDMAMLTHLNEPAVLYNLKDRYTSWMIYTYSGLFCVTVNPYKWLPVYNPEVVEGYRGKKRQEAPPHIFSISDNAYQFMLTDRENQSILITGESGAGKTVNTKRVIQYFATIAATGDLAKKKDSKMKGTLEDQIISANPLLEAFGNAKTVRNDNSSRFGKFIRIHFGTTGKLASADIETYLLEKSRVTFQLKAERSYHIFYQILSNKKPELIELLLITTNPYDYPFISQGEILVASIDDREELLATDSAIDILGFTPEEKSGLYKLTGAVMHYGNMKFKQKQREEQAEPDGTEVADKTAYLMGLNSSDLLKALCFPRVKVGNEYVTKGQTVDQVHHAVNALSKSVYEKLFLWMVTRINQQLDTKLPRQHFIGVLDIAGFEIFEYNSLEQLCINFTNEKLQQFFNHHMFVLEQEEYKKEGIEWTFIDFGMDLAACIELIEKPMGIFSILEEECMFPKATDTSFKNKLYDQHLGKSNNFQKPKVVKGRAEAHFSLIHYAGTVDYSVSGWLEKNKDPLNETVVGLYQKSSNRLLAHLYATFATADADSGKKKVAKKKGSSFQTVSALFRENLNKLMSNLRTTHPHFVRCIIPNETKTPGAMEHSLVLHQLRCNGVLEGIRICRKGFPNRILYGDFKQRYRVLNASAILEGQFIDSKKACEKLLASIDIDHTQYKFGHTKVFFKAGLLGTLEEMRDDRLAKLITRTQAVCRGFLMRVEFQKMVQRRESIFCIQYNIRSFMNVKHWPWMKLFFKIKPLLKSAETEKEMATMKEEFQKTKDELAKSEAKRKELEEKLVTLVQEKNDLQLQVQAESENLLDAEERCDQLIKAKFQLEAKIKEVTERAEDEEEINAELTAKKRKLEDECSELKKDIDDLELTLAKVEKEKHATENKVKNLTEELSGLDETIAKLTREKKALQEAHQQALDDLQAEEDKVNSLNKTKSKLEQQVEDLESSLEQEKKLRVDLERNKRKLEGDLKLAQESILDLENDKQQLDERLKKKDFEYCQLQSKVEDEQTLGLQFQKKIKELQARIEELEEEIEAERATRAKTEKQRSDYARELEELSERLEEAGGVTSTQIELNKKREAEFLKLRRDLEEATLQHEAMVATLRKKHADSVAELGEQIDNLQRVKQKLEKEKSEFKLEIDDLSSSMESVSKSKANLEKICRTLEDQLSEARGKNEEIQRSLSELTTQKSRLQTEAGELSRQLEEKESIVSQLSRSKQAFTQQTEELKRQLEEENKAKNALAHALQSSRHDCDLLREQYEEEQEGKAELQRALSKANSEVAQWRTKYETDAIQRTEELEEAQEKLAQRLQDSEEQVEAVNAKCASLEKTKQRLQGEVEDLMVDVERANSLAAALDKKQRNFDKVLAEWKTKCEESQAELEASLKESRSLSTELFKLKNAYEEALDQLETVKRENKNLEQEIADLTEQIAENGKTIHELEKSRKQIELEKADIQLALEEAEAALEHEEAKILRIQLELTQVKSEIDRKIAEKDEEIEQLKRNYQRTVETMQSALDAEVRSRNEAIRLKKKMEGDLNEIEIQLSHANRQAAETLKHLRSVQGQLKDTQLHLDDALRGQEDLKEQLAIVERRANLLQAEVEELRATLEQTERARKLAEQELLDSNERVQLLHTQNTSLIHTKKKLETDLMQLQSEVEDASRDARNAEEKAKKAITDAAMMAEELKKEQDTSAHLERMKKNLEQTVKDLQHRLDEAEQLALKGGKKQIQKLETRIRELEFELEGEQKKNTESVKGLRKYERRVKELTYQSEEDRKNVLRLQDLVDKLQVKVKSYKRQAEEADEQANAHLTKFRKAQHELEEAEERADIAESQVNKLRAKTRDFTSSRMVVHESEE

SEQ ID NO: 1176 - protein, 481 aa, Homo sapiens
MGALARALPSILLALLLTSTPEALGANPGLVARITDKGLQYAAQEGLLALQSELLRITLPDFTGDLRIPHVGRGRYEFHSLNIHSCELLHSALRPVPGQGLSLSISDSSIRVQGRWKVRKSFFKLQGSFDVSVKGISISVNLLLGSESSGRPTVTASSCSSDIADVEVDMSGDLGWLLNLFHNQIESKFQKVLESRICEMIQKSVSSDLQPYLQTLPVTTEIDSFADIDYSLVEAPRATAQMLEVMFKGEIFHRNHRSPVTLLAAVMSLPEEHNKMVYFAISDYVFNTASLVYHEEGYLNFSITDDMIPPDSNIRLTTKSFRPFVPRLARLYPNMNLELQGSVPSAPLLNFSPGNLSVDPYMEIDAFVLLPSSSKEPVFRLSVATNVSATLTFNTSKITGFLKPGKVKVELKESKVGLFNAELLEALLNYYILNTLYPKFNDKLAEGFPLPLLKRVQLYDLGLQIHKDFLFLGANVQYMRV

SEQ ID NO: 1177 - protein, 504 aa, Homo sapiens
MTPSPLLLLLLPPLLLGAFPPAAAARGPPKMADKVVPRQVARLGRTVRLQCPVEGDPPPLTMWTKDGRTIHSGWSRFRVLPQGLKVKQVEREDAGVYVCKATNGFGSLSVNYTLVVLDDISPGKESLGPDSSSGGQEDPASQQWARPRFTQPSKMRRRVIARPVGSSVRLKCVASGHPRPDITWMKDDQALTRPEAAEPRKKKWTLSLKNLRPEDSGKYTCRVSNRAGAINATYKVDVIQRTRSKPVLTGTHPVNTTVDFGGTTSFQCKVRSDVKPVIQWLKRVEYGAEGRHNSTIDVGGQKFVVLPTGDVWSRPDGSYLNKLLITRARQDDAGMYICLGANTMGYSFRSAFLTVLPDPKPQGPPVASSSSATSLPWPVVIGIPAGAVFILGTLLLWLCQAQKKPCTPAPAPPLPGHRPPGTARDRSGDKDLPSLAALSAGPGVGLCEEHGSPAAPQHLLGPGPVAGPKLYPKLYTDIHTHTHTHSHTHSHVEGKVHQHIHYQC

SEQ ID NO: 1178 - protein, 437 aa, Homo sapiens
MATRSCREKAQKLNEQHQLILSKLLREEDNKYCADCEAKGPRWASWNIGVFICIRCAGIHRNLGVHISRVKSVNLDQWTAEQIQCMQDMGNTKARLLYEANLPENFRRPQTDQAVEFFIRDKYEKKKYYDKNAIAITNKEKEKKKEEKKREKEPEKPAKPLTAEKLQKKDQQLEPKKSTSPKKAAEPTVDLLGLDGPAVAPVTNGNTTVPPLNDDLDIFGPMISNPLPATVMPPAQGTPSAPAAATLSTVTSGDLDLFTEQTTKSEEVAKKQLSKDSILSLYGTGTIQQQSTPGVFMGPTNIPFTSQAPAAFQGFPSMGVPVPAAPGLIGNVMGQSPSMMVGMPMPNGFMGNAQTGVMPLPQNVVGPQGGMVGQMGAPQSKFGLPQAQQPQWSLSQIMQKGDAVLQHSIISAIYWPTTRWLKCPLVDESADGWHEYQ

SEQ ID NO: 1179 - protein, 2131 aa, Homo sapiens
EPPEDDANIIEKILASKTVQEVHPGEPPFDLELFYVKYRNFSYLHCKWATMEELEKDPRIAQKIKRFRNKQAQMKHIFTEPDEDLFNPDYVEVDRILEVAHTKDAETGEEVTHYLVKWCSLPYEESTWELEEDVDPAKVKEFESLQVLPEIKHVERPASDSWQKLEKSREYKNSNQLREYQLEGMNWLLFNWYNRKNCILADEMGLGKTIQSITFLSEIFLRGIHGPFLIIAPLSTITNWEREFRTWTEMNAIVYHGSQISRQMIQQYEMVYRDAQGNPLSGVFKFHVVITTFEMILADCPELKKIHWSCVIIDEAHRLKNRNCKLLEGLKLMALEHKVLLTGTPLQNSVEELFSLLNFLEPSQFPSETAFLEEFGDLKTEEQVKKLQSILKPMMLRRLKDDVEKNLAPKQETIIEVELTNIQKKYYRAILEKNFSFLTKGANQHNMPNLINTMMELRKCCNHPYLINGAEEKILEDFRKTHSPDAPDFQLQAMIQAAGKLVLIDKLLPKLIAGGHKVLIFSQMVRCLDILEDYLIQRRYTYERIDGRVRGNLRQAAIDRFCKPDSDRFVFLLCTRAGGLGINLTAADTCIIFDSDWNPQNDLQAQARCHRIGQSKAVKVYRLITRNSYEREMFDKASLKLGLDKAVLQDINRKGGTNGVQQLSKMEVEDLLRKGAYGALMDEEDEGSKFCEEDIDQILQRRTHTITIQSEGKGSTFAKASFVASGNRTDISLDDPNFWQKWAKIAELDTEAKNEKESLVIDRPRVRKQTKHYNSFEEDELMEFSELDSDSDERPTRSRRLNDKARRYLRAECFRVEKNLLIFGWGRWKDILTHGRFKWHLNEKDMEMICRALLVYCVKHYKGDEKIKSFIWELITPTKDGQAQTLQNHSGLSAPVPRGRKGKKTKNQLLIPELKDADWLATCNPEVVLHDDGYKKHLKQHCNKVLLRVRMLYYLKAEILGEAAEKAFEGSPARELDVPLPDIDYMEIPVDWWDAEADKSLLIGVFKHGYERYNAMRADPALCFLEKVGMPDEKSLSAEQGVTDGTSDIPERGNTDKEDNAEDKVDGLQKQTESSSDGGDGVFSEKKDDSRAAQDGSDPDKSPWPVSSALTARLRRLVTVYQRCNRKELCRPEILGPGNQGYWVQEEMFRRTSEMDLINKEAQKRWTRREQADFYRTVSSFGVVYDQEKKTFDWTQFRIISRLDKKSDESLEQYFYSFVAMCRNVCRLPTWKDGGPPDTTIYVEPITEERAARTLYRIELLRKVREQVLKCPQLHERLQLCRPSLYLPVWWECGKHDRDLLIGTAKHGLNRTDCYIMNDPQLSFLDAYRNYAQHKRSGTQAPGNLCCLYQTNSKLYESLTYSQMSRTSESLENEPENLVRVESRDDHLSLPDVTCENFISKVQDVISINHDESLLPESLESMMYGKKVLSQEPSSFQESPSTNTESRKDVITISISKDGNCQSGGPEAEIASGPTFMGSLEAGGVAQANIKNGKHLLMSISKEGELCCSEAGQRPENIGQLEAKCLASPSLNPGNESGFVDMCSLSVCDSKRNLSSDQQLIDLLENKSLESKLILSQNHSDEEEEEEENEEENLAMAVGMGERPEVLHLTEPTTNISREKNQGFQDETKKGSLEVANQTPGLQRAFPAPAACQCHCKHMERWMHGLENDEFEIEKPKAYIPDLFKSKTNTIAMEGEPTAIPSQPFKVKHELLKEPWKESAEGQNVFPTYPLEGSELKSEDMDFENKDDYDRDGNCHSQDYPGKYSEEESKSSTSGITGDIGDELQEARAPTIAQLLQEKTLYSFSEWPKDRVIINRLDNICHVVLKGKWPSSQQYEPSGTLPTPVLTSSAGSRTSLSEPEAAEHSFSNGAALAAQIHKESFLAPVFTKDEQKHRRPYEFEVERDAKARGLEQFSATHGHTPIILNGWHGESAMDLSCSSEGSPGATSPFPVSASTPKIGAISSLQGALGMDLSGILQAGLIHPVTGQIVNGSLRRDDAATRRRRGRRKHVEGGMDLIFLKEQTLQAGILEVHEDPGQATLSTTHPEGPGPATSAPEPATAASSQAEKSIPSKSLLDWLRQQADYSLEVPGFGANFSDKPKQRRPRCKEPGKLDVSSLTGKREFLPSPRSQD

SEQ ID NO: 1180 - protein, 562 aa, Homo sapiens
GTRKNGRNRGGKANNPPYLPPEAEDGNIEYKLKLVNPSQYRFEHLVTQMKWRLQEGRGEAVYQIGVEDNGLLVGLAEEEMRASLKTLHRMAEKVGADITVLREREVDYDSDMPRKITEVLVRKVPDNQQFLDLRVAVLGNVDSGKSTLLGVLTQGELDNGRGRARLNLFRHLHEIQSGRTSSISFEILGFNSKGEVVNYSDSRTAEEICESSSKMITFIDLAGHHKYLHTTIFGLTSYCPDCALLLVSANTGIAGTTREHLGLALALKVPFFIVVSKIDLCAKTTVERTVRQLERVLKQPGCHKVPMLVTSEDDAVTAAQQFAQSPNVTPIFTLSSVSGESLDLLKVFLNILPPLTNSKEQEELMQQLTEFQVDEIYTVPEVGTVVGGTLSSGICREGDQLVVGPTDDGCFLELRVCSIQRNRSACRVLRAGQAATLALGDFDRALLRKGMVMVSPEMNPTICSVFEAEIVLLFHATTFRRGFQVTVHVGNVRQTAVVEKIHAKDKLRTGEKAVVRFRFLKHPEYLKVGAKLLFREGVTKGIGHVTDVQAITAGEAQANMGF

SEQ ID NO: 1181 - protein, 1027 aa, Homo sapiens
FFSFIEGCLVKNYMQRPSTEQLLKHPFIRDQPNERQVRIQLKDHIDRTRKKRGEKDETEYEYSGSEEEEEEVPEQEGEPSSIVNVPGESTLRRDFLRLQQENKERSEALRRQQLLQEQQLREQEEYKRQLLAERQKRIEQQKEQRRRLEEQQRREREARRQQEREQRRREQEEKRRLEELERRRKEEEERRRAEEEKRRVEREQEYIRRQLEEEQRHLEVLQQQLLQEQAMLLECRWREMEEHRQAERLQRQLQQEQAYLLSLQHDHRRPHPQHSQQPPPPQQERSKPSFHAPEPKAHYEPADRAREVEDRFRKTNHSSPEAQSKQTGRVLEPPVPSRSESFSNGNSESVHPALQRPAEPQVQWSHLASLKNNVSPVSRSHSFSDPSPKFAHHHLRSQDPCPPSRSEVLSQSSDSKSEAPDPTQKAWSRSDSDEVPPRVPVRTTSRSPVLSRRDSPLQGSGQQNSQAGQRNSTSSIEPRLLWERVEKLVPRPGSGSSSGSSNSGSQPGSHPGSQSGSGERFRVRSSSKSEGSPSQRLENAVKKPEDKKEVFRPLKPAGEVDLTALAKELRAVEDVRPPHKVTDYSSSSEESGTTDEEDDDVEQEGADESTSGPEDTRAASSLNLSNGETESVKTMIVHDDVESEPAMTPSKEGTLIVRQTQSASSTLQKHKSSSSFTPFIDPRLLQISPSSGTTVTSVVGFSCDGMRPEAIRQDPTRKGSVVNVNPTNTRPQSDTPEIRKYKKRFNSEILCAALWGVNLLVGTESGLMLLDRSGQGKVYPLINRRRFQQMDVLEGLNVLVTISGKKDKLRVYYLSWLRNKILHNDPEVEKKQGWTTVGDLEGCVHYKVVKYERIKFLVIALKSSVEVYAWAPKPYHKFMAFKSFGELVHKPLLVDLTVEEGQRLKVIYGSCAGFHAVDVDSGSVYDIYLPTHIQCSIKPHAIIILPNTDGMELLVCYEDEGVYVNTYGRIHQGCSSTVGRDAYISSIYSIQSDNGLGREGHRDPICGNWSLGWCVHAQKGSKTKILV

SEQ ID NO: 1182 - protein, 254 aa, Homo sapiens
MRHTWPFRNVPFGCCTPIHPVYTSSRGDHLGCWALRPECLRIVSRAPWTSTSVGFVAVGPQCLPVRGWHSSRPVRDDSVVEKSLKSLKDKNKKLEEGGPVYSPPAEVVVKKSLGQRVLDELKHYYHGFRLLWIDTKIAARMLWRILNGHSLTRRERRQFLRICADLFRLVPFLVFVVVPFMEFLLPVAVKLFPNMLPSTFETQSLKEERLKKELRVKLELAKFLQDTIEEMALKNKAAKGSATKDFSVFFQKVL

SEQ ID NO: 1183 - protein, 308 aa, Homo sapiens
ETFSSVISLLNEDPLSQDLPVKMASIFKNFVITYNRTYESKEEARWRLSVFVNNMVRAQKIQALDRGTAQYGVTKFSDLTEEEFRTIYLNTLLRKEPGNKMKQAKSVGDLAPPEWDWRSKGAVTKVKDQGMCGSCWAFSVTGNVEGQWFLNQGTLLSLSEQELLDCDKMDKACMGGLPSNAYSAIKNLGGLETEDDYSYQGHMQSCNFSAEKAKVYINDSVELSQNEQKLAAWLAKRGPISVAINAFGMQFYRHGISRPLRPLCSPWLIDHAVLLVGYGNREFRCLSCIQPGHRQGWDHSISGPLEGK

SEQ ID NO: 1184 - protein, 315 aa, Homo sapiens
TPDEPMDLEGAEDNHLSLLEAPGGQPRKSLRHSTRKKEWGKKEPVAGSPFERREAGPKGPCPGEEGEGVGDRVPNGILASGAGPSGPYGEPPYPCKEEEENGKDASEDSAQSGSEGGSGHASAHYMYRQEGYETVSYGDNLYVCIPCAKGFPSSEQLNAHVETHTEEELFIKEEGAYETGSGGAEEEAEDLSAPSAAYTAEPRPFKCSVCEKTYKDPATLRQHEKTHWLTRPFPCNICGKMFTQRGTMTRHMRSHLGLKPFACDECGMRFTRQYRLTEHMRVHSGEKPYECQLCGGKFTQQRNLISHLRMHTSPS

SEQ ID NO: 1185 - protein, 303 aa, Homo sapiens
VTYLEDYSAEYIIQQGGWGTVFSLESEEEEYPGITAEDSNDIYILPSDNSGQVSPPESPTVTTSWQSESLPVSLSASQSWHTESLPVSLGPESWQQIAMDPEEVKSLDSNGAGEKSENNSSNSDIVHVEKEEVPEGMEEAAVASVVLPARELQEALPEAPAPLLPHITATSLLGTREPDTEVITVEKSSPATSLFVELDEEEVKAATTQPTEVEEVVPALEPTETLLSEKEINAREESLVEELSPASEKKPVPPSEGKSRLSPAGEMKPMPLSEGKSILLFGGAAAVAILAVAIGVALALRKK

SEQ ID NO: 1186 - protein, 303 aa, Homo sapiens; identical to SEQ ID NO: 1185

SEQ ID NO: 1187 - protein, 741 aa, Homo sapiens
SWGSVLASHERSPRRAAALGEAKRPTRKTLEHNCAHFCINIPGSYVCRCKQGYILNSDQTTCRIQDLCAMEDHNCEQLCVNVPGSFVCQCYSGYALAEDGKRCVAVDYCASENHGCEHECVNADGSYLCQCHEGFALNPDEKTCTKIDYCASSNHGCQHECVNTDDSYSCHCLKGFTLNPDKKTCRRINYCALNKPGCEHECVNMEESYYCRCHRGYTLDPNGKTCSRVDHCAQQDHGCEQLCLNTEDSFVCQCSEGFLINEDLKTCSRVDYCLLSDHGCEYSCVNMDRSFACQCPEGHVLRSDGKTCAKLDSCALGDHGCEHSCVSSEDSFVCQCFEGYILREDGKTCRRKDVCQAIDHGCEHICVNSDDSYTCECLEGFRLAEDGKRCRRKDVCKSTHHGCEHICVNNGNSYICKCSEGFVLAEDGRRCKKCTEGPIDLVFVIDGSKSLGEENFEVVKQFVTGIIDSLTISPKAARVGLLQYSTQVHTEFTLRNFNSAKDMKKAVAHMKYMGKGSMTGLALKHMFERSFTQGEGARPLSTRVPRAAIVFTDGRAQDDVSEWASKAKANGITMYAVGVGKAIEEELQEIASEPTNKHLFYAEDFSTMDEISEKLKKGICEALEDSDGRQDSPAGELPKTVQQPTESEPVTINIQDLLSCSNFAVQHRYLFEEDNLLRSTQKLSHSTKPSGSPLEEKHDQCKCENLIMFQNLANEEVRKLTQRLEEMTQRMEALENRLRYR

SEQ ID NO: 1188 - protein, 161 aa, Homo sapiens
SAEVTSSTYSDEDRPPKVPPREPLSPSNSRTPSPKSLPSYLNGVMPPTQSFAPDPKYVSSKALQRQNSEGSASKVPCILPIIENGKKVSSTHYYLLPERPPYLDKYEKFFREAEETNGGAQIQPLPADCGISSATEKPDSKTKMDLGGHVKRKHLSYVVSP

SEQ ID NO: 1189 - protein, 594 aa, Homo sapiens
GVTTLRQRRKPVFHLSHEERVQHRNIKDLKLAFSEFYLSLILLQNYQNLNFTGFRKILKKHDKILETSRGADWRVAHVEVAPFYTCKKINQLISETEAVVTNELEDGDRQKAMKRLRVPPLGAAQPAPAWTTFRVGLFCGIFIVLNITLVLAAVFKLETDRSIWPLIRIYRGGFLLIEFLFLLGINTYGWRQAGVNHVLIFELNPRSNLSHQHLFEIAGFLGILWCLSLLACFFAPISVIPTYVYPLALYGFMVFFLINPTKTFYYKSRFWLLKLLFRVFTAPFHKVGFADFWLADQLNSLSVILMDLEYMICFYSLELKWDESKGLLPNNSEESGICHKYTYGVRAIVQCIPAWLRFIQCLRRYRDTKRAFPHLVNAGKYSTTFFMVTFAALYSTHKERGHSDTMVFFYLWIVFYIISSCYTLIWDLKMDWGLFDKNAGENTFLREEIVYPQKAYYYCAIIEDVILRFAWTIQISITSTTLLPHSGDIIATVFAPLEVFRRFVWNFFRLENEHLNNCGEFRAVRDISVAPLNADDQTLLEQMMDQDDGVRNRQKNRSWKYNQSISLRRPRLASQSKARDTKVLIEDTDDEANT

SEQ ID NO: 1190 - protein, 185 aa, Homo sapiens
PTSSNDDSKSNLNTSGKTTSSTDGPKFPGDKSSTTQNNNQQKKGIQVLPDGRVTNIPQGMVTDQFGMIGLLTFIRAAETDPGMVHLALGSDLTTLGLNLNSPENLYPKFASPWASSPCRPQDIDFHVPSEYLTNIHIRDKLAAIKLGRYGEDLLFYLYYMNGGDVLQLLAAVELYVQSILITFVL

SEQ ID NO: 1191 - protein, 240 aa, Homo sapiens
IISAPRHGSIIYHPSLLPRHRGASAINWTLIHGDKKGGFSIFWADDGLDTGDLLLQKECEVLPDDTVSTLYNRFLFPEGIKGMAVRLIAEGKAPRLPQPEEGATYEGIQKKETAKINWDQPAEAIHNWIRGNDKVPGAWTEACEQKLTFFNSTLNTSGLVPEGDALPIPGAHRPGVVTKAGLILFGNDDKMVRARLWVTCLLKATHAPVLGLRPHRKTLGSSGENGKNQTQEGTLTLICP

SEQ ID NO: 1192 - protein, 240 aa, Homo sapiens; identical to SEQ ID NO: 1191

SEQ ID NO: 1193 - protein, 540 aa, Homo sapiens
NSVRLWKAAVELEEPEDARIMLSRAVECCPTSVELWLALARLETYENARKVLNKARENIPTDRHIWITAAKLEEANGNTQMVEKIIDRAITSLRANGVEINREQWIQDAEECDRAGSVATCQAVMRAVIGIGIEEEDRKHTWMEDADSCVAHNALECARAIYAYALQVFPSKKSVWLRAAYFEKNHGTRESLEALLQRAVAHCPKAEVLWLMGAKSKWLAGDVPAARSILALAFQANPNSEEIWLAAVKLESENDEYERARRLLAKARSSAPTARVFMKSVKLEWVQDNIRAAQDLCEEALRHYEDFPKLWMMKGQIEEQKEMMEKAREAYNQGLKKCPHSTPLWLLLSRLEEKIGQLTRARAILEKSRLKNPKNPGLWLESVRLEYRAGLKNIANTLMAKALQECPNSGILWSEAIFLEARPQRRTKSVDALKKCEHDPHVLLAVAKLFWSQRKITKAREWFHRTVKIDSDLGDAWAFFYKFELQHGTEEQQEEVRKRCESAEPRHGELWCAVSKDIANWQKKIGDILRLVAGRIKNTF

SEQ ID NO: 1194 - protein, 877 aa, Homo sapiens
IRLVPCPPVCSDAFALVSNLSPYSHDEGCLSSSQDHIPLAALPLLATSSPQYQEAVATVIQRANLAYGDFIKSQEGMTFNGQVCLIGDCVGGILAFDALCYSNQPVSESQSSSRRGSVVSMQDNDLLSPGILMNAAHCCGGGGGGGGGGGSSGGGGSSGGSSLESSRHLSRSNVDIPRSNGTEDPKRQLPRKRSDSSTYELDTIQQHQAFLSSLHASVLRTEPCSRHSSSSTMLDGTGALGRFDFEITDLFLFGCPLGLVLALRKTVIPALDVFQLRPACQQVYNLFHPADPSASRLEPLLERRFHALPPFSVPRYQRYPLGDGCSTLLADVLQTHNAAFQEHGAPSSPGTAPASRGFRRASEISIASQVSGMAESYTASSIAQKAPDALSHTPSVRRLSLLALPAPSPTTPGPHPPARKASPGLERAPGLPELDIGEVAAKWWGQKRIDYALYCPDALTAFPTVALPHLFHASYWESTDVVSFLLRQVMRHDNSSILELDGKEVSVFTPSKPREKWQRKRTHVKLRNVTANHRINDALANEDGPQVLTGRFMYGPLDMVTLTGEKVDVHIMTQPPSGEWLYLDTLVTNNSGRVSYTIPESHRLGVGVYPIKMVVRGDHTFADSYITVLPKGTEFVVFSIDGSFAASVSIMGSDPKVRAGAVDVVRHWQDLGYLIIYVTGRPDMQKQRVVAWLAQHNFPHGVVSFCDGLVHDPLRHKANFLKLLISELHLRVHAAYGSTKDVAVYSAISLSPMQIYIVGRPTKKLQQQCQFITDGYAAHLAQLKYSHRARPARNTATRMALRKGSFGLPGQGDFLRSRNHLLRTISAQPSGPSHRHERTQSQADGEQRGQRSMSVAAGCWGRAMTGRLEPGAAAGPK

SEQ ID NO: 1195 - protein, 188 aa, Homo sapiens
GLMRSIGNKNTILLGLGFQILQLAWYGFGSEPWMMWAAGAVAAMSSITFPAVSALVSRTADADQQGVVQGMITGIRGLCNGLGPALYGFIFYIFHVELKELPITGTDLGTNTSPQHHFEQNSIIPGPPFLFGACSVLLALLVALLIPEHTNLSLRSSSWRKHCGSHSHPHNTQAPGEAKEPLLQDTNV

SEQ ID NO: 1196 - protein, 644 aa, Homo sapiens
VQASSPAEVPVSQPDPLPASDHSYELRNGEAIGRDRRGRRARRNNSGEAGGAATQELFCSACDQLFLSPHQLQQHLRSHREGVFKCPLCSRVFPSPSSLDQHLGDHSSESHFLCVDCGLAFGTEALLLAHRRAHTPNPLHSCPCGKTFVNLTKFLYHRRTHGVGGVPLPTTPVPPEEPVIGFPEPAPAETGEPEAPEPPVSEETSAGPAAPGTYRCLLCSREFGKALQLTRHQRFVHRLERRHKCSICGKMFKKKSHVRNHLRTHTGERPFPCPDCSKPFNSPANLARHRLTHTGERPYRCGDCGKAFTQSSTLRQHRLVHAQHFPYRCQECGVRFHRPYRLLMHRYHHTGEYPYKCRECPRSFLLRRLLEVHQLVVHAGRQPHRCPSCGAAFPSSLRLREHRCAAAAAQAPRRFECGTCGKKVGSAARLQAHEAAHAAAGPGEVLAKEPPAPRAPRATRAPVASPAALGSTATASPAAPARRRGLECSECKKLFSTETSLQVHRRIHTGERPYPCPDCGKAFRQSTHLKDHRRLHTGERPFACEVCGKAFAISMRLAEHRRIHTGERPYSCPDCGKSYRSFSNLWKHRKTHQQQHQAAVRQQLAEAEAAVGLAVMETAVEALPLVEAIEIYPLAEAEGVQISG

SEQ ID NO: 1197 - protein, 252 aa, Homo sapiens
DGGASVASDRAEGRPAKPSKTAAREKTEGAVAAVGGAPSSFRCCYGCCHEARLGRTSLPRGVIMLTEASLSIWGWGSLGIVLFLITFGPFVIFYLTFYILCFVGGGLVVTLLFGKTNSEKYLEQCEHSFLPPTSPGVPKCLEEMKREARTIKIDRRLTGANIIDEPLQQVIQFSLRDYVQYWYYTLSDDESFLLEIRQTLQNALIQFATRVSPCRPGWSTMAQSRLTATSASWNPVLFNKTLVSLCLLEYVI

SEQ ID NO: 1198 - protein, 144 aa, Homo sapiens
LRYMKESQVLLTLTNPVENLTHVTLFECEEGDPDDINSTAKVVVPPKELVLAGKDAAAEYDELAEPQDFQDDPDIIAFRKANKVGIFIKVTPQREEGEVTVCFKMKHDFKNLAAPIRPIEESDQGTEVIWLTQHVELSLGPLLP

SEQ ID NO: 1199 - protein, 1410 aa, Homo sapiens
DKGILVFQLKRRPPDHIPKKTKKHLEGKTPKGKERADGSGYGSTLPPEKLPYLVELSPGRRNHFAYYNYHTYEDGSDSRDKPKLYRLQLSVTEVGTEKLDDNSIQLFGPGIQPHHCDLTNMDGVVTVTPRSMDAETYVEGQRISETTMLQSGMKVQFGASHVFKFVDPSQDHALAKRSVDGGLMVKGPRHKPGIVQETTFDLGGDIHSGTALPTSKSTTRLDSDRVSSASSTAERGMVKPMIRVEQQPDYRRQESRTQDASGPELILPASIEFRESSEDSFLSAIINYTNSSTVHFKLSPTYVLYMACRYVLSNQYRPDISPTERTHKVIAVVNKMVSMMEGVIQKQKNIAGALAFWMANASELLNFIKQDRDLSRITLDAQDVLAHLVQMAFKYLVHCLQSELNNYMPAFLDDPEENSLQRPKIDDVLHTLTGAMSLLRRCRVNAALTIQLFSQLFHFINMWLFNRLVTDPDSGLCSHYWGAIIRQQLGHIEAWAEKQGLELAADCHLSRIVQATTLLTMDKYAPDDIPNINSTCFKLNSLQLQALLQNYHCAPDEPFIPTDLIENVVTVAENTADELARSDGREVQLEEDPDLQLPFLLPEDGYSCDVVRNIPNGLQEFLDPLCQRGFCRLIPHTRSPGTWTIYFEGADYESHLLRENTELAQPLRKEPEIITVTLKKQNGMGLSIVAAKGAGQDKLGIYVKSVVKGGAADVDGRLAAGDQLLSVDGRSLVGLSQERAAELMTRTSSVVTLEVAKQGAIYHGLATLLNQPSPMMQRISDRRGSGKPRPKSEGFELYNNSTQNGSPESPQLPWAEYSEPKKLPGDDRLMKNRADHRSSPNVANQPPSPGGKSAYASGTTAKITSVSTGNLCTEEQTPPPRPEAYPIPTQTYTREYFTFPASKSQDRMAPPQNQWPNYEEKPHMHTDSNHSSIAIQRVTRSQEELREDKAYQLERHRIEAAMDRKSDSDMWINQSSSLDSSTSSQEHLNHSSKSVTPASTLTKSGPGRWKTPAAIPATPVAVSQPIRTDLPPPPPPPPVHYAGDFDGMSMDLPLPPPPSANQIGLPSAQVAAAERRKREEHQRWYEKEKARLEEERERKRREQERKLGQMRTQSLNPAPFSPLTAQQMKPEKPSTLQRPQETVIRELQPQQQPRTIERRDLQYITVSKEELSSGTVCPPDPWKRDAKEKLEKQQQMHIVDMLSKEIQELQSKPDRSAEESDRLRKLMLEWQFQKRLQESKQKDEDDEEEEDDDVDTMLIMQRLEAERRARTAMPAISVLDLLQDEERRRQQQLEEMRKREAEDRARQEEERRRQEEERTKRDAEEKRRQEEGYYSRLEAERRRQHDEAARRLLEPEAPGLCRPPLPRDYEPPSPSPARRPSSPASAKRLLPQNTGPLPRLAVHCQVCCIQ

SEQ ID NO: 1200 - protein, 271 aa, Homo sapiens
DGMVHPYKGDRAEYCKAANKRVMDVINSARTRQQMLHAQTFHSNSLLTQEDAAAAGDRRPAPDTWIYPLIQMKPFEIQIDEIVTETLLTEAERGAKVYLTTGYFNLTQAYMDLVLGTRAEYQILLASPEVNGFFGAKGVAGAIPAAYVHIERQFFSEVCSLGQQERVQLQEYWRRGWTFHAKGLWLYLAGSSLPCLTLIGSPNFGYRSVHRDLEAQIAIVTENQALQQQLHQEQEQLYLRSGVVSSATFEQPSRQVKLWVKMVTPLIKNFF

SEQ ID NO: 1201 - protein, 2175 aa, Homo sapiens [sequence omitted]

SEQ ID NO: 1202 - protein, 469 aa, Homo sapiens
  VARIANT 55, 74: Xaa = Any Amino Acid
MITEGAQAPRLLLPPLLLLLTLPATGSDPVLCFTQYEESSGKCKGLLGGGVSVEXCCLNTAFAYQKRSGGLCQXCRSPRWSLWSTWAPCSVTCSEGSQLWYRRCVGWNGQCSGKVAPGTLEWQLQACEDQQCCPEMGGWSGWGPWEPCSVTCSKGTRTRRRACNHPAPKCGGHCPGQAQESEACDTQQVCPTHGAWATWGPWTPCSASCHGGPHEPKETRSRKCSAPEPSQKPPGKPCPGLAYEQRRCTGLPPCPVAGGWGPWGPVSPCPVTCGLGQTMEQRTCNHPVPQHGGPFCAGDATRTHICNTAVPCPVDGEWDSWGEWSPCIRRNMKSISCQEIPGQQSRGRTCRGRKFDGHRCAGQQQDIRHCYSIQHCPLKGSWSEWSTWGLCMPPCGPNPTRARQRLCTPLLPKYPPTVSMVEGQGEKNVTFWGRPLPRCEELQGQKLVVEEKRPCLHVPACKDPEEEEL

SEQ ID NO: 1203 - protein, 414 aa, Homo sapiens
MSKKISGGSVVEMQGDEMTRIIWELIKEKLIIPYVELDLHSYDLGIENRDATNDQVTKDAAEAIKKHNVGVKCATITPDEKRVEEFKLKQMWKSPNGTIRNILGGTVFREAIICKNIPRLVSGWVEPIIIGRHAYGDQYRATDFVVPGPGKVEITYTPSDGTQKVTYLVHNFEEGGGVAMGMYNQDKSIEDFAHSSFQMALSKGWPLYLSTKNTILKKYDGRFKDIFQEIYDKQYKSQFEAQKIWYEHRLIDDMVAQAMKSEGGFIWACKNYDGDVQSDSVAQGYGSLGMMTSVLVCPDGKTVEAEAAHGTVTRHYRMYQKGQETSTNPIASIFAWTRGLAHRAKLDNNKELAFFANALEEVSIETIEAGFMTKDLAACIKGLPNVQRSDYLNTFEFMDKLGENLKIKLAQAKL

SEQ ID NO: 1204 - protein, 1582 aa, Homo sapiens
MGSKRRRATSPSSSVSGDFDDGHHSVSTPGPSRKRRRLSNLPTVDPIAVCHELYNTIRDYKDEQGRLLCELFIRAPKRRNQPDYYEVVSQPIDLMKIQQKLKMEEYDDVNLLTADFQLLFNNAKSYYKPDSPEYKAACKLWDLYLRTRNEFVQKGEADDEDDDEDGQDNQGTVTEGSSPAYLKEILEQLLEAIVVATNPSGRLISELFQKLPSKVQYPDYYAIIKEPIDLKTIAQRIQNGSYKSIHAMAKDIDLLAKNAKTYNEPGSQVFKDANSIKKIFYMKKAEIEHHEMAKSSLRMRTPSNLAAARLTGPSHSKGSLGEERNPTSKYYRNKRAVQGGRLSAITMALQYGSESEEDAALAAARYEEGESEAESITSFMDVSNPFYQLYDTVRSCRNNQGQLIAEPFYHLPSKKKYPDYYQQIKMPISLQQIRTKLKNQEYETLDHLECDLNLMFENAKRYNVPNSAIYKRVLKLQQVMQAKKKELARRDDIEDGDSMISSATSDTGSAKRKSKKNIRKQRMKILFNVVLEAREPGSGRRLCDLFMVKPSKRDYPDYYKIILEPMDLKIIEHNIRNDKYAGEEGMIEDMKLMFRNARHYNEEGSQVYNDAHILEKLLKEKRKELGPLPDDDDMASPKLKLSRKSGISPKKSKYMTPMQQKLNEVYEAVKNYTDKRGRRLSAIFLRLPSRSELPDYYLTIKKPMDMEKIRSHMMANKYQDIDSMVEDFVMMFNNACTYNEPESLIYKDALVLHKVLLETRRDLEGDEDSHVPNVTLLIQELIHNLFVSVMSHQDDEGRCYSDSLAEIPAVDPNFPNKPPLTFDIIRKNVENNRYRRLDLFQEHMFEVLERARRMNRTDSEIYEDAVELQQFFIKIRDELCKNGEILLSPALSYTTKHLHNDVEKERKEKLPKEIEEDKLKREEEKREAEKSEDSSGAAGLSGLHRTYSQDCSFKNSMYHVGDYVYVEPAEANLQPHIVCIERLWEDSAEKEVFKSDYYNKVPVSKILGKCVVMFVKEYFKLCPENFRDEDVFVCESRYSAKTKSFKKIKLWTMPISSVRFVPRDVPLPVVRVASVFANADKGDDEKNTDNSEDSRAEDNFNLEKEKEDVPVEMSNGEPVCHYFEQLHYNDMWLKVGDCVFIKSHGLVRPRVGRIEKVWVRDGAAYFYGPIFIHPEETEHEPTKMFYKKEVFLSNLEETCPMTCILGKCAVLSFKDFLSCKPTEIPENDILLCESRYNESDKQMKKFKGLKRFSLSAKVVDDEIYYFRKPIVPQKEPSPLLGKKIQLLEAKFAELEGGDDDIEEMGEEDSESTPKSAKGSAKKEGSKRKINMSGYILFSSEMRAVIKAQHPDYSFGELSRLVGTEWRNLETAKKAEYEGMMGGYPPGLPPLQGPVDGLVSMGSMQPLHPGGPPPHHLPPGVPGLPGIPPPGVMNQGVAPMVGTPAPGGSPYGQQVGVLGPPRQQAPPPYPGPHPAGPPVIQQPTTPMFVAPPPKTQRLLHSEAYLKYIEGLSAESNSISKWDQTLAARRRDVHLSKEQESRLPSHWLKSKGAHTTMADALWRLRDLMLRDTLNIRQAYNLENV

SEQ ID NO: 1205 - protein, 795 aa, Homo sapiens
MEKQKPFALFVPPRSSSSQVSAVKPQTLGGDSTFFKSFNKCTEDDFEFPFAKTNLSKNGENIDSDPALQKVNFLPVLEQVGNSDCHYQEGLKDSDLENSEGLSRVYSKLYKEAEKIKKWKVSTEAELRQKESKLQENRKIIEAQRKAIQELQFGNEKVSLKLEEGIQENKDLIKENNATRHLCNLLKETCARSAEKTKKYEYEREETRQVYMDLNNNIEKMITAFEELRVQAENSRLEMHFKLKEDYEKIQHLEQEYKKEINDKEKQVSLLLIQITEKENKMKDLTFLLEESRDKVNQLEEKTKLQSENLKQSIEKQHHLTKELEDIKVSLQRSVSTQKALEEDLQIATKTICQLTEEKETQMEESNKARAAHSFVVTEFETTVCSLEELLRTEQQRLEKNEDQLKILTMELQKKSSELEEMTKLTNNKEVELEELKKVLGEKETLLYENKQFEKIAEELKGTEQELIGLLQAREKEVHDLEIQLTAITTSEQYYSKEVKDLKTELENEKLKNTELTSHCNKLSLENKELTQETSDMTLELKNQQEDINNNKKQEERMLKQIENLQETETQLRNELEYVREELKQKRDEVKCKLDKSEENCNNLRKQVENKNKYIEELQQENKALKKKGTAESKQLNVYEIKVNKLELELESAKQKFGEITDTYQKEIEDKKISEENLLEEVEKAKVIADEAVKLQKEIDKRCQHKIAEMVALMEKHKHQYDKIIEERDSELGLYKSKEQEQSSLRASLEIELSNLKAELLSVKKQLEIEREEKEKLKREAKENTATLKEKKKKK

SEQ ID NO: 1206 - protein, 1035 aa, Homo sapiens [sequence omitted]

SEQ ID NO: 1207 - protein, 524 aa, Homo sapiens
MYALFLLASLLGAALAGPVLGLKECTRGSAVWCQNVKTASDCGAVKHCLQTVWNKPTVKSLPCDICKDVVTAAGDMLKDNATEEEILVYLEKTCDWLPKPNMSASCKEIVDSYLPVILDIIKGEMSRPGEVCSALNLCESLQKHLAELNHQKQLESNKIPELDMTEVVAPFMANIPLLLYPQDGPRSKPQPKDNGDVCQDCIQMVTDIQTAVRTNSTFVQALVEHVKEECDRLGPGMADICKNYISQYSEIAIQMMMHMQPKEICALVGFCDEVKEMPMQTLVPAKVASKNVIPALELVEPIKKHEVPAKSDVYCEVCEFLVKEVTKLIDNNKTEKEILDAFDKMCSKLPKSLSEECQEVVDTYGSSILSILLEEVSPELVCSMLHLCSGTRLPALTVHVTQPKDGGFCEVCKKLVGYLDRNLEKNSTKQEILAALEKGCSFLPDPYQKQCDQFVAEYEPVLIEILVEVMDPSFVCLKIGACPSAHKPLLGTEKCIWGPSYWCQNTETAAQCNAVEHCKRHVWN

SEQ ID NO: 1208 - protein, 248 aa, Homo sapiens
MSVGIDHLALDEIKKRGIRVGYTPDVLTRYHRRTRSLPATYHLPPVAGGHRGSEEWWWTSWKPLWLCGYGLTQSTVGIIGLGRIGQAIARRLKPFGVQRFLYTGRQPRPEEAAEFQAEFVSTPELAAQSDFIVVACSLTPATEGLCNKDFFQKMKETAVFINISRGDVVNQDDLYQALASGKIAAAGLDVTSPEPLPTNHPLLTLKNCVILPHIGSATHRTRNTMSLLAANNLLAGLRGEPMPSELKL

SEQ ID NO: 1209 - protein, 735 aa, Homo sapiens
MAKERGLISPSDFAQLQKYMEYSTKKVSDVLKLFEDGEMAKYVQGDAIGYEGFQQFLKIYLEVDNVPRHLSLALFQSFETGHCLNETNVTKDVVCLNDVSCYFSLLEGGRPEDKLEFTFKLYDTDRNGILDSSEVDKIILQMMRVAEYLDWDVSELRPILQEMMKEIDYDGSGSVSQAEWVRAGATTVPLLVLLGLEMTLKDDGQHMWRPKRFPRPVYCNLCESSIGLGKQGLSCNLCKYTVHDQCAMKALPCEVSTYAKSRKDIGVQSHVWVRGGCESGRCDRCQKKIRIYHSLTGLHCVWCHLEIHDDCLQAVGHECDCGLLRDHILPPSSIYPSVLASGPDRKNSKTSQKTMDDLNLSTSEALRIDPVPNTHPLLVFVNPKSGGKQGQRVLWKFQYILNPRQVFNLLKDGPEIGLRLFKDVPDSRILVCGGDGTVGWILETIDKANLPVLPPVAVLPLGTGNDLARCLRWGGGYEGQNLAKILKDLEMSKVVHMDRWSVEVIPQQTEEKSDPVPFQIINNYFSIGVDASIAHRFHIMREKYPEKFNSRMKNKLWYFEFATSESIFSTCKKLEESLTVEICGKPLDLSNLSLEGIAVLNIPSMHGGSNLWGDTRRPHGDIYGINQALGATAKVITDPDILKTCVPDLSDKRLEVVGLEGAIEMGQIYTKLKNAGRRLAKCSEITFHTTKTLPMQIDVEPWMQTPCTIKITHKNQMPMLMGPPPRSTNFFGFLS

SEQ ID NO: 1210 - protein, 126 aa, Homo sapiens
MWYLAKLIRGMSIDQALAQLEFNDKKGAKIIKEVLLEAQDMAVRDHNVEFRSNLYIAESTSGRGQCLKRIRYHGRGRFGIMEKVYCHYFVKLVEGPPPPPEPPKTAVAHAKEYIQQLRSRTIVHTL

SEQ ID NO: 1211 - protein, 955 aa, Homo sapiens
MVNPTLGVHEADLLKTSGTLISFIYPAQNPELLNKLSQRKTTVLAMDQVPRVTIAQGYDALSSMANIAGYKAVVLAANHFGRFFTGQITAAGKVPPAKILIVGGGVAGLASAGAAKSMGAIVRGFDTRAAALEQFKSLGAEPLEVDLKESGEGQGGYAKEMSKEFIEAEMKLFAQQCKEVDILISTALIPGKKAPVLFNKEMIESMKEGSVVVDLAAEAGGNFETTKPGELYIHKGITHIGYTDLPSRMATQASTLYSNNITKLLKAISPDKDNFYFDVKDDFDFGTMGHVIRGTVVMKDGKVIFPAPTPKNIPQGAPVKQKTVAELEAEKAATITPFRKTMSTASAYTAGLTGILGLGIAAPNLAFSQMVTTFGLAGIVGYHTVWGVTPALHSPLMSVTNAISGLTAVGGLALMGGHLYPSTTSQGLAALAAFISSVNIAGGFLVTQRMLDMFKRPTDPPEYNYLYLLPAGTFVGGYLAALYSGYNIEQIMYLGSGLCCVGALAGLSTQGTARLGNALGMIGVAGGLAATLGVLKPGPELLAQMSGAMALGGTIGLTIAKRIQISDLPQLVAAFHSLVGLAAVLTCIAEYIIEYPHFATDAAANLTKIVAYLGTYIGGVTFSGSLIAYGKLQGLLKSAPLLLPGRHLLNAGLLAASVGGIIPFMVDPSFTTGITCLGSVSALSAVMGVTLTAAIGGADMPVVITVLNSYSGWALCAEGFLLNNNLLTIVGALIGSSGAILSYIMCVAMNRSLANVILGGYGTTSTAGGKPMEISGTHTEINLDNAIDMIREANSIIITPGYGLCAAKAQYPIADLVKMLTEQGKKVRFGIHPVAGRMPGQLNVLLAEAGVPYDIVLEMDEINHDFPDTDLVLVIGANDTVNSAAQEDPNSIIAGMPVLEVWKSKQVIVMKRSLGVGYAAVDNPIFYKPNTAMLLGDAKKTCDALQAKVRESYQK

SEQ ID NO: 1212 - protein, 82 aa, Homo sapiens
MGREFGNLTRMRHVISYSLSPFEQRAYPHVFTKGIPNVLRRIRESFFRVVPQFVVFYLIYTWGTEEFERSKRKNPAAYENDK

SEQ ID NO: 1213 - protein, 82 aa, Homo sapiens; identical to SEQ ID NO: 1212

SEQ ID NO: 1214 - protein, 639 aa, Homo sapiens
MEDSQDLNEQSVKKTCTESDVSQSQNSRSMEMQDLASPHTLVGGGDTPGSSKLEKSNLSSTSVTTNGTGGENMTVLNTADWLLSCNTPSSATMSLLAVKTEPLNSSETTATTGDGALDTFTGSVITSSGYSPRSAHQYSPQLYPSKPYPHILSTPAAQTMSAYAGQTQYSGMQQPAVYTAYSQTGQPYSLPTYDLGVMLPAIKTESGLSQTQSPLQSGCLSYSPGFSTPQPGQTPYSYQMPGSSFAPSSTIYANNSVSNSTNFSGSQQDYPSYTAFGQNQYAQYYSASTYGAYMTSNNTADGTPSSTSTYQLQESLPGLTNQPGEFDTMQSPSTPIKDLDERTCRSSGSKSRGRGRKNNPSPPPDSDLERVFVWDLDETIIVFHSLLTGSYAQKYGKDPPMAVTLGLRMEEMIFNLADTHLFFNDLEECDQVHIDDVSSDDNGQDLSTYSFATDGFHAAASSANLCLPTGVRGGVDWMRKLAFRYRRVKELYNTYKNNVGGLLGPAKRDAWLQLRAEIEGLTDSWLTNALKSLSIISTRSNCINVLVTTTQLIPALAKVLLYSLGGAFPIENIYSATKIGKESCFERIMQRFGRKVVYVVIGDGVEEEQAAKKHNMPFWRISSHSDLLALHQALELEYL

SEQ ID NO: 1215 - protein, 1327 aa, Homo sapiens
MEIEEESAEKIQFLKSSGTSLLSTDSLETNELVVSELNHSSLGVGLDTLEEQEEKEQFFARLEKGLTSSIDYSRLNKELDSNDSTHFKALHSNQANAELTDDEHENESKHEELAENYSDDFEDEYVGAPLTTKDEEMPSKENSKSEKISVPKQEEEKTGMLANVVLLDSLDSVAEVNLDEQDKITPKPRCLPEMTENEMTGTGVSYGQSSSDVEALHQAYCHIAHSLGDEDKQKIESNTVEDIKSSVKGHPQENEENSKNISTMESDLPTVEELMKPIRIDSFGISGFDLQPVSSEKVAERKETEFFSSLPLKMNPNILSQDSQHVNLFFDKNDENVILQKTTNESMENSCPQVTEVTATEEHVDKMYLNILRKKITVNSSSLSQDDKINKTYRSQLSSEEEGAVMGKQVPYKKARSAPPLLKRKPQSGLYASVRSSGYGKPSSPLKMFSTLEKKTSEDIIKSKNLRSISTSNQPRKKEILSGTKLIKPAALDKPAHKTESCLSTRKKSENPTETDSCIQFQTDSLGYCGENKEKKLLMFKRVQEAEDKWRGAQALIEQIKATFSEKEKELENKLEELKKQQEKELFKLNQDNYILQAKLSSFEETNKKQRWLHFGEAADPVTGEKLKQIQKEIQEQETLLQGYQQENERLYNQVKDLQEQNKKNEERMFKENQSLFSEVASLKEQMHKSRFLSQVVEDSEPTRNQNFTDLLAELRMAQKEKDSLLEDIKRLKQDKQALEVDFEKMKKERDQAKDQIAYVTGEKLYEIKILEETHKQEISRLQKRLQWYAENQELLDKDALRLREANEEIEKLKLEIEKLKAESGNPSIRQKIRLKDKAADAKKIQDLERQVKEMEGILKRRYPNSLPALILAASAAGDTVDKNTVEFMEKRIKKLEADLEGKDEDAKKSLRTMEQQFQKMKIQYEQRLEQQEQLLACKLNQHDSPRIKALEKELDDIKEAHQITVRNLEAEIDVLKHQNAELDVKKNDKDDEDFQSIEFQVEQAHAKAKLVRLNEELAAKKREIQDLSKTVERLQKDRRMMLSNQNSKGREEMSAKRAKKDVLHSSKGNANSFPGTLDSKLYQPHTFTDSHVSEVLQENYRLKNELEGLISEKNELKMKSEAVMNQFENSMRRVKEDTAAHIASLKASHQREIEKLLCQNAVENSSSKVAELNRKIATQEVLIRHFQSQVNELQSKQESLVVSEVREEILQKEITKLLEELREAKENHTPEMKHFVGLEKKIKQMEMRHAQREQELQQIIQQTHQVVETEQNKEVEKWKRLAQLKNRELEKFRTELDSILDVLRELHRQGVVVPVAFADEMNAPEY

SEQ ID NO: 1216 - protein, 1223 aa, Homo sapiens
MRSRSNSGVRLDGYARLVQQTILCHQNPVTGLLPASYDQKDAWVRDNVYSILAVWGLGLAYRKNADRDEDKAKAYELEQSVVKLMRGLLHCMIRQVDKVESFKYSQSTKDSLHAKYNTKTCATVVGDDQWGHLQLDATSVYLLFLAQMTASGLHIIHSLDEVNFIQNLVFYIEAAYKTADFGIWERGDKTNQGISELNASSVGMAKAALEALDELDLFGVKGGPQSVIHVLADEVQHCQSILNSLLPRASTSKEVDASLLSVVSFPAFAVEDSQLVELTKQEIITKLQGRYGCCRFLRDGYKTPKEDPNRLYYEPAELKLFENIECEWPLFWTYFILDGVFSGNAEQVQEYKEALEAVLIKGKNGVPLLPELYSVPPDRVDEEYQNPHTVDRVPMGKLPHMWGQSLYILGSLMAEGFLAPGEIDPLNRRFSTVPKPDVVVQVSILAETEEIKTILKDKGIYVETIAEVYPIRVQPARILSHIYSSLGCNNRMKLSGRPYRHMGVLGTSKLYDIRKTIFTFTPQFIDQQQFYLALDNKMIVEMLRTDLSYLCSRWRMTGQPTITFPISHSMLDEDGTSLNSSILAALRKMQDGYFGGARVQTGKLSEFLTTSCCTHLSFMDPGPEGKLYSEDYDDNYDYLESGNWMNDYDSTSHARCGDEVARYLDHLLAHTAPHPKLAPTSQKGGLDRFQAAVQTTCDLMSLVTKAKELHVQNVHMYLPTKLFQASRPSFNLLDSPHPRQENQVPSVRVEIHLPRDQSGEVDFKALVLQLKETSSLQEQADILYMLYTMKGPDWNTELYNERSATVRELLTELYGKVGEIRHWGLIRYISGILRKKVEALDEACTDLLSHQKHLTVGLPPEPREKTISAPLPYEALTQLIDEASEGDMSISILTQEIMVYLAMYMRTQPGLFAEMFRLRIGLIIQVMATELAHSLRCSAEEATEGLMNLSPSAMKNLLHHILSGKEFGVERSVRPTDSNVSPAISIHEIGAVGATKTERTGIMQLKSEIKQVEFRRLSISAESQSPGTSMTPSSGSFPSAYDQQSSKDSRQGQWQRRRRLDGALNRVPVGFYQKVWKVLQKCHGLSVEGFVLPSSTTREMTPGEIKFSVHVESVLNRVPQPEYRQLLVEAILVLTMLADIEIHSIGSIIAVEKIVHIANDLFLQEQKTLGADDTMLAKDPASGICTLLYDSAPSGRFGTMTYLSKAAATYVQEFLPHSICAMQ

SEQ ID NO: 1217 - protein, 489 aa, Homo sapiens
MAAAAARVVLSSAARRRLWGFSESLLIRGAAGRSLYFGENRLRSTQAATQVVLNVPETRVTCLESGLRVASEDSGLSTCTVGLWIDAGSRYENEKNNGTAHFLEHMAFKGTKKRSQLDLELEIENMGAHLNAYTSREQTVYYAKAFSKDLPRAVEILADIIQNSTLGEAEIERERGVILREMQEVETNLQEVVFDYLHATAYQNTALGRTILGPTENIKSISRKDLVDYITTHYKGPRIVLAAAGGVSHDELLDLAKFHFGDSLCTHKGEIPALPPCKFTGSEIRVRDDKMPLAHLAIAVEAVGWAHPDTICLMVANTLIGNWDRSFGGGMNLSSKLAQLTCHGNLCHSFQSFNTSYTDTGLWGLYMVCESSTVADMLHVVQKEWMRLCTSVTESEVARARNLLKTNMLLQLDGSTPICEDIGRQMLCYNRRIPIPELEARIDAVNAETIREVCTKYIYNRSPAIAAVGPIKQLPDFKQIRSNMCWLRD

SEQ ID NO: 1218 - protein, 484 aa, Homo sapiens
MFEMLTGSLPFQGKDRKETMTLILKAKLGMPQFLSTEAQSLLRALFKRNPANRLGSGPDGAEEIKRHVFYSTIDWNKLYRREIKPPFKPAVAQPDDTFYFDTEFTSRTPKDSPGIPPSAGAHQLFRGFSFVATGLMEDDGKPRAPQAPLHSVVQQLHGKNLVFSDGYVVKETIGVGSYSECKRCVHKATNMEYAVKVIDKSKRDPSEEIEILLRYGQHPNIITLKDVYDDGKHVYLVTELMRGGELLDKILRQKFFSEREASFVLHTIGKTVEYLHSQGVVHRDLKPSNILYVDESGNPECLRICDFGFAKQLRAENGLLMTPCYTANFVAPEVLKRQGYDEGCDIWSLGILLYTMLAGYTPFANGPSDTPEEILTRIGSGKFTLSGGNWNTVSETAKDLVSKMLHVDPHQRLTAKQVLQHPWVTQKDKLPQSQLSHQDLQLVKGAMAATYSALNSSKPTPQLKPIESSILAQRRVRKLPSTTL

SEQ ID NO: 1219 - protein, 400 aa, Homo sapiens
MTTKNLETKVTVTSSPIRGAGDGMETEEPPKSVEVTSGVQSRKHHSLQSPWKKAVPSESPGVLQLGKMLTEKAMEVKAVRILVPKAAITHDIPNKNTKVKSLGHHKGEFLGQSEGVIEPNKELSEVKNVLEKLKNSERRLLQDKEGLSNQLRVQTEVNRELKKLLVASVGDDLQYHFERLAREKNQLILENEALGRNTAQLSEQLERMSIQCDVWRSKFLASRVMADELTNSRAALQRQNRDAHGAIQDLLSEREQFRQEMIATQKLLEELLVSLQWGREQTYSPSVQPHSTAELALTNHKLAKAVNSHLLGNVGINNQKKIASTVEFCSTPAEKMAETVLRILDPVTCKESSPDNPFFESSPTTLLATKKNIGRFHPYTRYENITFNCCNHCRGELIAL

SEQ ID NO: 1220 - protein, 295 aa, Homo sapiens
MDNSGKEAEAMALLAEAERKVKNSQSFFSGLFGGSSKIEEACEIYARAANMFKMAKNWSAAGNAFCQAAQLHLQLQSKHDAATCFVDAGNAFKKADPQEAINCLMRAIEIYTDMGRFTIAAKHHISIAEIYETELVDIEKAIAHYEQSADYYKGEESNSSANKCLLKVAGYAALLEQYQKAIDIYEQVGTNAMDSPLLKYSAKDYFFKAALCHFCIDMLNAKLAVQKYEELFPAFSDSRECKLMKKLLEAHEEQNVDSYTESVKEYDSISRLDQWLTTMLLRIKKTIQGDEEDLR

SEQ ID NO: 1221 - protein, 190 aa, Homo sapiens
MAGSRLETVGSIFSRTRDLVRAGVLKEKPLWFDVYDAFPPLREPVFQRPRVRYGKAKAPIQDIWYHEDRIRAKFYSVYGSGQRAFDLFNPNFKSTCQRFVEKYTELQKLGETDEEKLFVETGKALLAEGVILRRVGEARTQHGGSHVSRKSEHLSVRPQTALEENETQKEVPQDQHLEAPADQSKGLLPP

SEQ ID NO: 1222 - protein, 916 aa, Homo sapiens
MSYTLDSLGNPSAYRRVTETRSSFSRVSGSPSSGFRSQSWSRGSPSTVSSSYKRSMLAPRLAYSSAMLSSAESSLDFSQSSSLLNGGSGPGGDYKLSRSNEKEQLQGLNDRFAGYIEKVHYLEQQNKEIEAEIQALRQKQASHAQLGDAYDQEIRELRATLEMVNHEKAQVQLDSDHLEEDIHRLKERFEEEARLRDDTEAAIRALRKDIEEASLVKVELDKKVQSLQDEVAFLRSNHEEEVADLLAQIQASHITVERKDYLKTDISTALKEIRSQLESHSDQNMHQAEEWFKCRYAKLTEAAEQNKEAIRSAKEEIAEYRRQLQSKSIELESVRGTKESLERQLSDIEERHNHDLSSYQDTIQQLENELRGTKWEMARHLREYQDLLNVKMALDIEIAAYRKLLEGEETRFSTFAGSITGPLYTHRPPITISSKIQKPKVEAPKLKVQHKFVEEIIEETKVEDEKSEMEEALTAITEELAVSMKEEKKEAAEEKEEEPEAEEEEVAAKKSPVKATAPEVKEEEGEKEEEEGQEEEEEEDEGAKSDQAEEGGSEKEGSSEKEEGEQEEGETEAEAEGEEAEAKEEKKVEEKSEEVATKEELVADAKVEKPEKAKSPVPKSPVEEKGKSPVPKSPVEEKGKSPVPKSPVEEKGKSPVPKSPVEEKGKSPVSKSPVEEKAKSPVPKSPVEEAKSKAEVGKGEQKEEEEKEVKEAPKEEKVEKKEEKPKDVPEKKKAESPVKEEAVAEVVTITKSVKVHLEKETKEEGKPLQQEKEKEKAGGEGGSEEEGSDKGAKGSRKEDIAVNGEVEGKEEVEQETKEKGSGREEEKGVVTNGLDLSPADEKKGGDKSEEKVVVTKTVEKITSEGGDGATKYITKSVTVTQKVEEHEETFEEKLVSTKKVEKVTSHAIVKEVTQSD

SEQ ID NO: 1223 - protein, 578 aa, Homo sapiens
MNISVDLETNYAELVLDVGRVTLGENSRKKMKDCKLRKKQNERVSRAMCALLNSGGGVIKAEIENEDYSYTKDGIGLDLENSFSNILLFVPEYLDFMQNGNYFLIFVKSWSLNTSGLRITTLSSNLYKRDITSAKVMNATAALEFLKDMKKTRGRLYLRPELLAKRPRVDIQEENNMKALAGVFFDRTELDRKEKLTFTESTHVEIKNFSTEKLLQRIKEILPQYVSAFANTDGGYLFIGLNEDKEIIGFKAEMSDLDDLEREIEKSIRKMPVHHFCMEKKKINYSCKFLGVYDKGSLCGYVCALRVERFCCAVFAKEPDSWHVKDNRVMQLTRKEWIQFMVEAEPKFSSSYEEVISQINTSLPAPHSWPLLEWQRQRHHCPGLSGRITYTPENLCRKLFLQHEGLKQLICEEMDSVRKGSLIFSRSWSVDLGLQENHKVLCDALLISQDSPPVLYTFHMVQDEEFKGYSTQTALTLKQKLAKIGGYTKKVCVMTKIFYLSPEGMTSCQYDLRSQVIYPESYYFTRRKYLLKALFKALKRLKSLRDQFSFAENLYQIIGIDCFQKNDKKMFKSCRRLT

SEQ ID NO: 1224 - protein, 770 aa, Homo sapiens
MEKRAAAGLEGAPGARAQLAVVCLVNIFLTGRLSSAVPALAACSGKLEQHTERRGVIYSPAWPLNYPPGTNCSWYIQGDRGDMITISFRNFDVEESHQCSLDWLLLGPAAPPRQEAFRLCGSAIPPAFISARDHVWIFFHSDASSSGQAQGFRLSYIRGKLGQASCQADEFRCDNGKCLPGPWQCNTVDECGDGSDEGNCSAPASEPPGSLCPGGTFPCSGARSTRCLPVERRCDGLQDCGDGSDEAGCPDLACGRRLGSFYGSFASPDLFGAARGPSDLHCTWLVDTQDSRRVLLQLELRLGYDDYVQVYEGLGERGDRLLQTLSYRSNHRPVSLEAAQGRLTVAYHARARSAGHGFNATYQVKGYCLPWEQPCGSSSDSDGGSLGDQGCFSEPQRCDGWWHCASGRDEQGCPACPPDQYPCEGGSGLCYTPADRCNNQKSCPDGADEKNCFSCQPGTFHCGTNLCIFETWRCDGQEDCQDGSDEHGCLAAVPRKVITAALIGSLVCGLLLVIALGCAFKLYSLRTQEYRAFETQMTRLEAEFVRREAPPSYGQLIAQGLIPPVEDFPVYSASQASVLQNLRTAMRRQMRRHASRRGPSRRRLGRLWNRLFHRPRAPRGQIPLLTAARPSQTVLGDGFLQPAPGAAPDPPAPLMDTGSTRAAGDRPPSAPGRAPEVGPSGPPLPSGLRDPECRPVDKDRKVCREPLVDGPAPADAPREPCSAQDPHPQVSTASSTLGPHSPEPLGVCRNPPPPCSPMLEASDDEALLVC

SEQ ID NO: 1225 - protein, 583 aa, Homo sapiens
MSDNPPRMEVCPYCKKPFKRLKSHLPYCKMIGPTIPTDQKVYQSKPATLPRAKKMKGPIKDLIKAKGKELETENEERNSKLVVDKPEQTVKTFPLPAVGLERAATTKADKDIKNPIQPSFKMLKNTKPMTTFQEETKAQFYASEKTSPKRELAKDLPKSGESRCNPSEAGASLLVGSIEPSLSNQDRKYSSTLPNDVQTTSGDLKLDKIDPQRQELLVKLLDVPTGDCHISPKNVSDGVKRVRTLLSNERDSKGRDHLSGVPTDVTVTETPEKNTESLILSLKMSSLGKIQVMEKQEKGLTLGVETCGSKGNAEKSMSATEKQERTVMSHGCENFNTRDSVTGKESQGERPHLSLFIPRETTYQFHSVSQSSSQSLASLATTFLQEKKAEAQNHHCVPDVKALMESPEGQLSLEPKSDSQFQASHTGCQSPLCSAQRHTPQSPFTNHAAAAGRKTLRSCMGLEWFPELYPGYLGLGVLPGKPQCWNAMTQKPQLISPQGERLSQVSLLERSSTHIRSLEPPAGLTTSNFSLMRLLGAVQKGWIRCNTTIRKSGFGGITMLFTGYFVLCCSWSFRRLKLQRWRK

SEQ ID NO: 1226 - protein, 215 aa, Homo sapiens
MATAPYNYSYIFKYIIIGDMGVGKSCLLHQFTEKKFMADCPHTIGVEFGTRIIEVSGQKIKLQIWDTAGQERFRAVTRSYYRGAAGALMVYDITRRSTYNHLSSWLTDARNLTNPNTVIILIGNKADLEAQRDVTYEEAKQFAEENGLLFLEASAKTGENVEDAFLEAAKKIYQNIQDGSLDLNAAESGVQHKPSAPQGGRLTSEPQPQREGCGC

SEQ ID NO: 1227 - protein, 517 aa, Homo sapiens [sequence omitted]

SEQ ID NO: 1228 - protein, 1347 aa, Homo sapiens [sequence omitted]

SEQ ID NO: 1229 - protein, 811 aa, Homo sapiens
MESEVYDTPENIVHGSGSQLFDHVAECLGDFMEKRKIKDKKLPVGFTFSFPCQQSKIDEAILITWTKRFKASGVEGADVVKLLNKAIKKRGDYDANIVAVVNDTVGTMMTCGYDDQHCEVGLIIGTGTNACYMEELRHIDLVEGDEGRMCINTEWGAFGDDGSLEDIRTEFDREIDRGSLNPGKQLFEKMVSGMYLGELVRLILVKMAKEGLLFEGRITPELLTRGKFNTSDVSAIEKNKEGLHNAKEILTRLGVEPSDDDCVSVQHVCTIVSFRSANLVAATLGAILNRLRDNKGTPRLRTTVGVDGSLYKTHPQYSRRFHKTLRRLVPDSDVRFLLSESGSGKGAAMVTAVAYRLAEQHRQIEETLAHFHLTKDMLLEVKKRMRAEMELGLRKQTHNNAVVKMLPSFVRRTPDGTENGDFLALDLGGTNFRVLLVKIRSGKKRTVEMHNKIYAIPIEIMQGTGEELFDHIVSCISDFLDYMGIKGPRMPLGFTFSFPCQQTSLDAGILITWTKGFKATDCVGHDVVTLLRDAIKRREEFDLDVVAVVNDTVGTMMTCAYEEPTCEVGLIVGTGSNACYMEEMKNVEMVEGDQGQMCINMEWGAFGDNGCLDDIRTHYDRLVDEYSLNAGKQRYEKMISGMYLGEIVRNILIDFTKKGFLFRGQISETLKTRGIFETKFLSQIESDRLALLQVRAILQQLGLNSTCDDSILVKTVCGVVSRRAAQLCGAGMAAVVDKIRENRGLDRLNVTVGVDGTLYKLHPHFSRIMHQTVKELSPKCNVSFLLSEDGSGKGAALITAVGVRLRTEASS

SEQ ID NO: 1230 - protein, 487 aa, Homo sapiens
MLRAPGCLLRTSVAPAAALAAALLSSLARCSLLEPRDPVASSLSPYFGTKTRYEDVNPVLLSGPEAPWRDPELLEGTCTPVQLVALIRHGTRYPTVKQIRKLRQLHGLLQARGSRDGGASSTGSRDLGAALADWPLWYADWMDGQLVEKGRQDMRQLALRLASLFPALFSRENYGRLRLITSSKHRCMDSSAAFLQGLWQHYHPGLPPPDVADMEFGPPTVNDKLMRFFDHCEKFLTEVEKNATALYHVEAFKTGPEMQNILKKVAATLQVPVNDLNADLIQVAFFTCSFDLAIKGVKSPWCDVFDIDDAKVLEYLNDLKQYWKRGYGYTINSRSSCTLFQDIFQHLDKAVEQKQRSQPISSPVILQFGHAETLLPLLSLMGYFKDKEPLTAYNYKKQMHRKFRSGLIVPYASNLIFVLYHCENAKTPKEQFRVQMLLNEKVLPLAYSQETVSFYEDLKNHYKDILQSCQTSEECELARANSTSDEL

SEQ ID NO: 1231 - protein, 779 aa, Homo sapiens
MTHTRRKSLPMLSSGLTGRREPLQMEDSNMEQGVEGVEPGMPESPGHLTGRRKNYPLRKRPLVPEKPKACKVLLTRLENVAGPRSADEADELPPDLPKPPSPAPSSEDPGLAQPRKRRLASLNAEALNNLLLEREDTSSLAGTRRSRAGDPHRSRDRDRATGGWSSSKKRPRLGDLGGGSRDLSPEPAPDEGPRRDGDPAPKRLASLNAAAFLKLSQERELPLRLPRAHAEVDGRSTEPPAPKAPRPKWPKVNGKNYPKAWQGASSGEAAGPPGWQGCPDEPWPSATPCGPSVQPSHQPLSKALESPLGLRPHLPLLMGGQAALKPEPGRPGEESPAPKQELHQPSFPTPQLSPLPMPGNPADYNGLCVGPELTALGSFYLYCGQEGLQCGGYSPCPMLPEGKLSPVAAPHEEGLLLAPSSVPSGTPFQHPPWGSSRYCSSEDTGVNGYSICGVLPLSVTHAGTTCGGCPYKMPFAAGCRSLGQLEFPLPEAGHPASPAHPLLGCPVPSVPPAAEPVPHLQTPTSEPQTVARACPQSAKPPSGSKSGLRTGSSCRHTARSKAARRPSHPKQPRVQRPRPRRRRRRRTNGWVPVGAACEKAVYVLDEPEPAIRKSYQAVERHGETIRVRDTVLLKSGPRKTSTPYVAKISALWENPESGELMMSLLWYYRPEHLQGGRSPSMHEPLQNEVFASRHQDQNSVACIEEKCYVLTFAEYCRFCAMAKRRGEGLPSRKTALVPPSADYSTPPHRTVPEDTDPELVFLCRHVYDFRHGRILKNPQ

SEQ ID NO: 1232 - protein, 991 aa, Homo sapiens
MEEYEKFCEKSLARIQEASLSTESFLPAQSESISLIRFHGVAILSPLLNIEKRKEMQQEKQKALDVEARKQVNRKKALLTRVQEILDNVQVRKAPNASDFDQWEMETVYSNSEVRNLNVPATFPNSFPSHTEHSTAAKLDKIAGILPLDNEDQCKTDGIDLARDSEGFNSPKQCDSSNISHVENEAFPKTSSATPQETLISDGPFSVNEQQDLPLLAEVIPDPYVMSLQNLMKKSKEYIEREQSRRSLRGSMNRIVNESHLDKEHDAVEVADCVKEKGQLTGKHCVSVIPDKPSLNKSNVLLQGASTQASSMSMPVLASFSKVDIPIRTGHPTVLESNSDFKVIPTFVTENNVIKSLTGSYAKLPSPEPSMSPKMHRRRSRTSSACHILINNPINACELSPKGKEQAMDLIIQDTDENTNVPEIMPKLPTDLAGVCSSKVYVGKNTSEVKEDVVLGKSNQVCQSSGNHLENKVTHGLVTVEGQLTSDERGAHIMNSTCAAMPKLHEPYASSQCIASPNFGTVSGLKPASMLEKNCSLQTELNKSYDVKNPSPLLMQNQNTRQQMDTPMVSCGNEQFLDNSFEKVKRRLDLDIDGLQKENCPYVITSGITEQERQHLPEKRYPKGSGFVNKNKMLGTSSKESEELLKSKMLAFEEMRKRLEEQHAQQLSLLIAEQEREQERLQKEIEEQEKMLKEKKAMTAEASELDINNAVELEWRKISDSSLLETMLSQADSLHTSNSNSSGFTNSAMQYSFVSANEAPFYLWGSSTSGLTKLSVTRPFGRAKTRWSQVFSLEIQAKFNKITAVAKGFLTRRLMQTDKLKQLRQTVKDTMEFIRSFQSEAPLKRGIVSAQDASLQERVLAQLRAALYGIHDIFFVMDAAERMSILHHDREVRKEKMLRQMDKMKSPRVALSAATQKSLDRKKYMKAAEMGMPNKKFLVKQNPSETRVLQPNQGQNAPVHRLLSRQGSICRKNPKKAAKCCDNLRRQHSLG

SEQ ID NO: 1233 - protein, 439 aa, Homo sapiens
MADPDVLTEVPAALKRLAKYVIRGFYGIEHALALDILIRNSCVKEEDMLELLKFDRKQLRSVLNNLKGDKFIKCRMRVETAADGKTTRHNYYFINYRTLVNVVKYKLDHMRRRIETDERDSTNRASFKCPVCSSTFTDLEANQLFDPMTGTFRCTFCHTEVEEDESAMPKKDARTLLARFNEQIEPIYALLRETEDVNLAYEILEPEPTEIPALKQSKDHAATTAGAASLAGGHHREAWATKGPSYEDLYTQNVVINMDDQEDLHRASLEGKSAKERPIWLRESTVQGAYGSEDMKEGGIDMDAFQEREEGHAGPDDNEEVMRALLIHEKKTSSAMAGSVGAAAPVTAANGSDSESETSESDDDSPPRPAAVAVHKREEDEEEDDEFEEVADDPIVMVAGRPFSYSEVSQRPELVAQMTPEEKEAYIAMGQRMFEDLFE

SEQ ID NO: 1234 - protein, 328 aa, Homo sapiens
MAAGIVASRRLRDLLTRRLTGSNYPGLSISLRLTGSSAQEEASGVALGEAPDHSYESLRVTSAQKHVLHVQLNRPNKRNAMNKVFWREMVECFNKISRDADCRAVVISGAGKMFTAGIDLMDMASDILQPKGDDVARISWYLRDIITRYQETFNVIERCPKPVIAAVHGGCIGGGVDLVTACDIRYCAQDAFFQVKEVDVGLAADVGTLQRLPKVIGNQSLVNELAFTARKMMADEALGSGLVSRVFPDKEVMLDAALALAAEISSKSPVAVQSTKVNLLYSRDHSVAESLNYVASWNMSMLQTQDLVKSVQATTENKELKTVTFSKL

SEQ ID NO: 1235 - protein, 471 aa, Homo sapiens
MPNSEPASLLELFNSIATQGELVRSLKAGNASKDEIDSAVKMLVSLKMSYKAAAGEDYKADCPPGNPAPTSNHGPDATEAEEDFVDPWTVQTSSAKGIDYDKLIVRFGSSKIDKELINRIERATGQRPHHFLRRGIFFSHRDMNQVLDAYENKKPFYLYTGRGPSSEAMHVGHLIPFIFTKWLQDVFNVPLVIQMTDDEKYLWKDLTLDQAYSYAVENAKDIIACGFDINKTFIFSDLDYMGMSSGFYKNVVKIQKHVTFNQVKGIFGFTDSDCIGKISFPAIQAAPSFSNSFPQIFRDRTDIQCLIPCAIDQDPYFRMTRDVAPRIGYPKPALLHSTFFPALQGAQTKMSASDPNSSIFLTDTAKQIKTKVNKHAFSGGRDTIEEHRQFGGNCDVDVSFMYLTFFLEDDDKLEQIRKDYTSGAMLTGELKKALIEVLQPLIAEHQARRKEVTDEIVKEFMTPRKLSFDFQ

SEQ ID NO: 1236 - protein, 567 aa, Homo sapiens
MGRGLLRGLWPLHIVLWTRIASTIPPHVQKSVNNDMIVTDNNGAVKFPQLCKFCDVRFSTCDNQKSCMSNCSITSICEKPQEVCVAVWRKNDENITLETVCHDPKLPYHDFILEDAASPKCIMKEKKKPGETFFMCSCSSDECNDNIIFSEEYNTSNPDLLLVIFQVTGISLLPPLGVAISVIIIFYCYRVNRQQKLSSTWETGKTRKLMEFSEHCAIILEDDRSDISSTCANNINHNTELLPIELDTLVGKGRFAEVYKAKLKQNTSEQFETVAVKIFPYEEYASWKTEKDIFSDINLKHENILQFLTAEERKTELGKQYWLITAFHAKGNLQEYLTRHVISWEDLRKLGSSLARGIAHLHSDHTPCGRPKMPIVHRDLKSSNILVKNDLTCCLCDFGLSLRLDPTLSVDDLANSGQVGTARYMAPEVLESRMNLENVESFKQTDVYSMALVLWEMTSRCNAVGEVKDYEPPFGSKVREHPCVESMKDNVLRDRGRPEIPSFWLNHQGIQMVCETLTECWDHDPEARLTAQCVAERFSELEHLDRLSGRSCSEEKIPEDGSLNTTK

SEQ ID NO: 1237 - protein, 548 aa, Homo sapiens
MQGLLRFEDQDSARGDQNIAMFYPTSTQMVYRRGLQAIPLSVDLWIHYINFLKETLDPGDPETNNTIRGTFEHAVLAAGTDFRSDRLWEMYINWENEQGNLREVTAIYDRILGIPTQLYSHHFQRFKEHVQNNLPRDLLTGEQFIQLRRELASVNGHSGDDGPPGDDLPSGIEDITDPAKLITEIENMRHRIIEIHQEMFNYNEHEVSKRWTFEEGIKRPYFHVKPLEKAQLKNWKEYLEFEIENGTHERVVVLFERCVISCALYEEFWIKYAKYMENHSIEGVRHVFSRACTIHLPKKPMVHMLWAAFEEQQGNINEARNILKTFEECVLGLAMVRLRRVSLERRHGNLEEAEHLLQDAIKNAKSNNESSFYAVKLARHLFKIQKNLPKSRKVLLEAIERDKENTKLYLNLLEMEYSGDLKQNEENILNCFDKAVHGSLPIKMRITFSQRKVEFLEDFGSDVNKLLNAYDEHQTLLKEQDSLKRKAENGSEEPEEKKAHTEDTTSSSTQMIDGDLQANQAVYNYSAWYQYNYQNPWNYGQYYPPPPT

SEQ ID NO: 1238 - protein, 468 aa, Homo sapiens
MAARLVSRCGAVRAAPHSGPLVSWRRWSGASTDTVYDVVVSGGGLVGAAMACALGYDIHFHDKKILLLEAGPKKVLEKLSETYSNRVSSISPGSATLLSSFGAWDHICNMRYRAFRRMQVWDACSEALIMFDKDNLDDMGYIVENDVIMHALTKQLEAVSDRVTVLYRSKAIRYTWPCPFPMADSSPWVHITLGDGSTFQTKLLIGADGHNSGVRQAVGIQNVSWNYDQSAVVATLHLSEATENNVAWQRFLPSGPIALLPLSDTLSSLVWSTSHEHAAELVSMDEEKFVDAVNSAFWSDADHTDFIDTAGAMLQYAVSLLKPTKVSARQLPPSVARVDAKSRVLFPLGLGHAAEYVRPRVALIGDAAHRVHPLAGQGVNMGFGDISSLAHHLSTAAFNGKDLGSVSHLTGYETERQRHNTALLAATDLLKRLYSTSASPLVLLRTWGLQATNAVSPLKEQIMAFASK

SEQ ID NO: 1239 - protein, 145 aa, Homo sapiens
MNGRVDYLVTEEEINLTRGPSGLGFNIVGGTDQQYVSNDSGIYVSRIKENGAAALDGRLQEGDKILSVNGQDLKNLLHQDAVDLFRNAGYAVSLRVQHRLQVQNGPIGHRGEGDPSGIPIFMVLVPVFALTMVAAWAFMRYRQQL

SEQ ID NO: 1240 - protein, 879 aa, Homo sapiens
MRLHLLLLLALCGAGTTAAELSYSLRGNWSICNGNGSLELPGAVPGCVHSALFQQGLIQDSYYRFNDLNYRWVSLDNWTYSKEFKIPFEISKWQKVNLILEGVDTVSKILFNEVTIGETDNMFNRYSFDITNVVRDVNSIELRFQSAVLYAAQQSKAHTRYQVPPDCPPLVQKGECHVNFVRKEQCSFSWDWGPSFPTQGIWKDVRIEAYNICHLNYFTFSPIYDKSAQEWNLEIESTFDVVSSKPVGGQVIVAIPKLQTQQTYSIELQPGKRIVELFVNISKNITVETWWPHGHGNQTGYNMTVLFELDGGLNIEKSAKVYFRTVELIEEPIKGSPGLSFYFKINGFPIFLKGSNWIPADSFQDRVTSELLRLLLQSVVDANMNTLRVWGGGIYEQDEFYELCDELGIMVWQDFMFACALYPTDQGFLDSVTAEVAYQIKRLKSHPSIIIWSGNNENEEALMMNWYHISFTDRPIYIKDYVTLYVKNIRELVLAGDKSRPFITSSPTNGAETVAEAWVSQNPNSNYFGDVHFYDYISDCWNWKVFPKARFASEYGYQSWPSFSTLEKVSSTEDWSFNSKFSLHRQHHEGGNKQMLYQAGLHFKLPQSTDPLRTFKDTIYLTQVMQAQCVKTETEFYRRSRSEIVDQQGHTMGALYWQLNDIWQAPSWASLEYGGKWKMLHYFAQNFFAPLLPVGFENENTFYIYGVSDLHSDYSMTLSVRVHTWSSLEPVCSRVTERFVMKGGEAVCLYEEPVSELLRRCGNCTRESCVVSFYLSADHELLSPTNYHFLSSPKEAVGLCKAQITAIISQQGDIFVFDLETSAVAPFVWLDVGSIPGRFSDNGFLMTEKTRTILFYPWEPTSKNELEQSFHVTSLTDIY

SEQ ID NO: 1241 - protein, 204 aa, Homo sapiens
MAAAGWRDGSGQEKYRLVVVGGGGVGKSALTIQFIQSYFVTDYDPTIEDSYTKQCVIDDRAARLDILDTAGQEEFGAMREQYMRTGEGFLLVFSVTDRGSFEEIYKFQRQILRVKDRDEFPMILIGNKADLDHQRQVTQEEGQQLARQLKVTYMEASAKIRMNVDQAFHELVRVIRKFQEQECPPSPEPTRKEKDKKGCHCVIF

SEQ ID NO: 1242 - protein, 517 aa, Homo sapiens
MLRAAARFGPRLGRRLLSAAATQAVPAPNQQPEVFCNQIFINNEWHDAVSRKTFPTVNPSTGEVICQVAEGDKEDVDKAVKAARAAFQLGSPWRRMDASHRGRLLNRLADLIERDRTYLAALETLDNGKPYVISYLVDLDMVLKCLRYYAGWADKYHGKTIPIDGDFFSYTRHEPVGVCGQIIPWNFPLLMQAWKLGPALATGNVVVMKVAEQTPLTALYVANLIKEAGFPPGVVNIVPGFGPTAGAAIASHEDVDKVAFTGSTEIGRVIQVAAGSSNLKRVTLELGGKSPNIIMSDADMDWAVEQAHFALFFNQGQCCCAGSRTFVQEDIYDEFVERSVARAKSRVVGNPFDSKTEQGPQVDETQFKKILGYINTGKQEGAKLLCGGGIAADRGYFIQPTVFGDVQDGMTIAKEEIFGPVMQILKFKTIEEVVGRANNSTYGLAAAVFTKDLDKANYLSQALQAGTVWVNCYDVFGAQSPFGGYKMSGSGRELGEYGLQAYTEVKTVTVKVPQKNS

SEQ ID NO: 1243 - protein, 924 aa, Homo sapiens
MEIKEEGASEEGQHFLPTAQANDPGDCQFTSIQKTPNEPQLEFILACKDLVAPVRDRKLNTLVQISVIHPVEQSLTRYSSTEIVEGTRDPLFLTGVTFPSEYPIYEETKIKLTVYDVKDKSHDTVRTSVLPEHKDPPPEVGRSFLGYASFKVGELLKSKEQLLVLSLRTSDGGKVVGTIEVSVVKMGEIEDGEADHITTDVQGQKCALVCECTAPESVSGKDNLPFLNSVLKNPVCKLYRFPTSDNKWMRIREQMSESILSFHIPKELISLHIKEDLCRNQEIKELGELSPHWDNLRKNVLTHCDQMVNMYQDILTELSKETGSSFKSSSSKGEKTLEFVPINLHLQRMQVHSPHLKDALYDVITVGAPAAHFQGFKNGGLRKLLHRFETERRNTGYQFIYYSPENTAKAKEVLSNINQLQPLIATHADLLLNSASQHSPDSLKNSLKMLSEKTELFVHAFKDQLVRSALLALYTARPGGILKKPPSPKSSTEESSPQDQPPVMRGQDSIPHHSDYDEEEWDRVWANVGKSLNCIIAMVDKLIERDGGSEGSGGNNDGEKEPSLTDAIPSHPREDWYEQLYPLILTLKDCMGEVVNRAKQSLTFVLLQELAYSLPQCLMLTLRRDIVFSQALAGLVCGFIIKLQTSLYDPGFLQQLHTVGLIVQYEGLLSTYSDEIGMLEDMAVGISDLKKVAFKIIEAKSNDVLPVITGRREHYVVEVKLPARMFESLPLQIKEGQLLHVYPVLFNVGINEQQTLAERFGDVSLQESINQENFELLQEYYKIFMEKMPPDYISHFQEQNDLKALLENLLQNIQSKKRKNVEIMWLAATICRKLNGIRFTCCKSAKDRTSMSVTLEQCSILRDEHQLHKDFFIRALDCMRREGCRIENVLKNIKCRKYAFNMLQLMAFPKYYRPPEGTYGKADT

SEQ ID NO: 1244 - protein, 462 aa, Homo sapiens
MAATVNLELDPIFLKALGFLHSKSKDSAEKLKALLDESLARGIDSSYRPSQKDVEPPKISSTKNISIKQEPKISSSLPSGNNNGKVLTTEKVKKEAEKRPADKMKSDITEGVDIPKKPRLEKPETQSSPITVQSSKDLPMADLSSFEETSADDFAMEMGLACVVCRQMMVASGNQLVECQECHNLYHRDCHKPQVTDKEANDPRLVWYCARCTRQMKRMAQKTQKPPQKPAPAVVSVTPAVKDPLVKKPETKLKQETTFLAFKRTEVKTSTVISGNSSSASVSSSVTSGLTGWAAFAAKTSSAGPSTAKLSSTTQNNTGKPATSSANQKPVGLTGLATSSKGGIGSKIGSNNSTTPTVPLKPPPPLTLGKTGLSRSVSCDNVSKVGLPSPSSLVPGSSSQLSGNGNSGTSGPSGSTTSKTTSESSSSPSASLKGPTSQESQLNAMKRLQMVKKKAAQKKLKK

SEQ ID NO: 1245 - protein, 201 aa, Homo sapiens
MANKGPSYGMSREVQSKIEKKYDEELEERLVEWIIVQCGPDVGRPDRGRLGFQVWLKNGVILSKLVNSLYPDGSKPVKVPENPPSMVFKQMEQVAQFLKAAEDYGVIKTDMFQTVDLFEGKDMAAVQRTLMALGSLAVTKNDGHYRGDPNWFMKKAQEHKREFTESQLQEGKHVIGLQMGSNRGASQAGMTGYGRPRQIIS

SEQ ID NO: 1246 - protein, 392 aa, Homo sapiens
  VARIANT 49, 90, 93: Xaa = Any Amino Acid
MEKLLETIDQLQLEFARPRALQQLAGWCRGGPAGRVAGTLCGGDPEPAXSARSVQGNELPEAGRERGAFMGIQGEIQKFCQTYGLRPCSXNPXITLSPQDINTKWDMVRKLVPSRDQTLQEELARQQVNERLRRQFAAQANAIGPWIQAKVEEVGRLAAGLAGSLEEQMAGLRQQEQNIINYKTNIDRLEGDHQLLQESLVFDNKHTVYSMEHIRVGWEQLLTSIARTINEVENQVLTRDAKGLSQEQLNEFRASFNHFDRKRNGMMEPDDFRACLISMGYDLGEVEFARIMTMVDPNAAGVVTFQAFIDFMTRETAETDTTEQVVASFKILAGDKNYITPEELRPSPLPSRPSTASAVWCPTRDPGPRLEPWTTWPSPVPSMGRATFDPNH

SEQ ID NO: 1247 - protein, 499 aa, Homo sapiens
MADCCAKQEPERNECFLQHKDDNPNLPRLVRPEVDVMCTAFHDNEETFLKKYLYEIARRHPYFYAPELLFFAKRYKAAFTECCQAADKAACLLPKLDELRDEGKASSAKQRLKCASLQKFGERAFKAWAVARLSQRFPKAEFAEVSKLVTDLTKVHTECCHGDLLECADDRADLAKYICENQDSISSKLKECCEKPLLEKSHCIAEVENDEMPADLPSLAADFVESKDVCKNYAEAKDVFLGMFLYEYARRHPDYSVVLLLRLAKTYETTLEKCCAAADPHECYAKVFDEFKPLVEEPQNLIKQNCELFEQLGEYKFQNALLVRYTKKVPQVSTPTLVEVSRNLGKVGSKCCKHPEAKRMPCAEDYLSVVLNQLCVLHEKTPVSDRVTKCCTESLVNRRPCFSALEVDETYVPKEFNAETFTFHADICTLSEKERQIKKQTALVELVKHKPKATKEQLKAVMDDFAAFVEKCCKADDKETCFAEEGKKLVAASQAALGL

SEQ ID NO: 1248 - protein, 473 aa, Homo sapiens
MRLLESKKGLSFFAFEHSEEYQQAQHKFLVAVESMEPNNIVVLLQTSPYHVDSLLQLSDACRFQEDQEMARDLVERALYSMECAFHPLFSLTSGACRLDYRRPENRSFYLALYKQMSFLEKRGCPRTALEYCKLILSLEPDEDPLCMLLLIDHLALRARNYEYLIRLFQEWEAHRNLSQLPNFAFSVPLAYFLLSQQTDLPECEQSSARQKASLLIQQALTMFPGVLLPLLESCSVRPDASVSSHRFFGPNAEISQPPALSQLVNLYLGRSHFLWKEPATMSWLEENVHEVLQAVDAGDPAVEACENRRKVLYQRAPRNIHRHVILSEIKEAVAALPPDVTTQSVMGFDPLPPSDTIYSYVRPERKGEEERNSVIWGSQLCVCRPRSFPSPPNVQALACRPLWQAKSYQPWKHHCSLLPVTVAKLYHGGGEARGRSGWGSEPQPGPEQADAGCARHDGQLPPQRPGGAARGRR

SEQ ID NO: 1249 - protein, 298 aa, Homo sapiens
MRAEMPNGLRPLLWLAGLLGAGGTVSVVYIFGNNPVDENGAKIPDEFDNDPILVQQLRRTYKYFKDYRQMIIEPTSPCLLPDPLQEPYYQPPYTLVLELTGVLLHPEWSLATGWRFKKRPGIETLFQQLAPLYEIVIFTSETGMTAFPLIDSVDPHGFISYRLFRDATRYMDGHHVKDISCLNRDPARVVVVDCKKEAFRLQPYNGVALRPWDGNSDDRVLLDLSAFLKTIALNGVEDVRTVLEHYALEDDPLAAFKQRQSRLEQEEQQRLAELSKSNKQNLFLGSLTSRLWPRSKQP

SEQ ID NO: 1250 - protein, 126 aa, Homo sapiens
MNKHNLRLVQLASELILIEIIPKLFLSQVTTISHIKREKIPPNHRKGILCMFPWQCVVYVFSNFVWLVIHRFSNGFIQFLGEPYRLMTASGTHGRIKFMVDIPIIKNTQVLRIPVLKDPKMLSKKH

SEQ ID NO: 1251 - protein, 405 aa, Homo sapiens
MDSAITLWQFLLQLLQKPQNKHMICWTSNDGQFKLLQAEEVARLWGIRKNKPNMNYDKLSRALRYYYVKNIIKKVNGQKFVYKFVSYPEILNMDPMTVGRIEGDCESLNFSEVSSSSKDVENGGKDKPPQPGAKTSSRNDYIHSGLYSSFTLNSLNSSNVKLFKLIKTENPAEKLAEKKSPQEPTPSVIKFVTTPSKKPPVEPVAATISIGPSISPSSEETIQALETLVSPKLPSLEAPTSASNVMTAFATTPPISSIPPLQEPPRTPSPPLSSHPDIDTDIDSVASQPMELPENLSLEPKDQDSVLLEKDKVNNSSRSKKPKGLELAPTLVITSSDPSPLGILSPSLPTASLTPAFFSQVACSLFMVSPLLSFICPFKQIQNLYTQVCFLLLRFVLERLCVTVM

SEQ ID NO: 1252 - protein, 820 aa, Homo sapiens
MKMLLLLHCLGVFLSCSGHIQDEHPQYHSPPDVVIPVRITGTTRGMTPPGWLSYILPFGGQKHIIHIKVKKLLFSKHLPVFTYTDQGAILEDQPFVQNNCYYHGYVEGDPESLVSLSTCFGGFQGILQINDFAYEIKPLAFSTTFEHLVYKMDSEEKQFSTMRSGFMQNEITCRMEFEEIDNSTQKQSSYVGWWIHFRIVEIVVVIDNYLYIRYERNDSKLLEDLYVIVNIVDSILDVIGVKVLLFGLEIWTNKNLIVVDDVRKSVHLYCKWKSENITPRMQHDTSHLFTTLGLRGLSGIGAFRGMCTPHRSCAIVTFMNKTLGTFSIAVAHHLGHNLGMNHDEDTCRCSQPRCIMHEGNPPITKFSNCSYGDFWEYTVERTKCLLETVHTKDIFNVKRCGNGVVEEGEECDCGPLKHCAKDPCCLSNCTLTDGSTCAFGLCCKDCKFLPSGKVCRKEVNECDLPEWCNGTSHKCPDDFYVEDGIPCKERGYCYEKSCHDRNEQCRRIFGAGANTASETCYKELNTLGDRVGHCGIKNATYIKCNISDVQCGRIQCENVTEIPNMSDHTTVHWARFNDIMCWSTDYHLGMKGPDIGEVKDGTECGIDHICIHRHCVHITILNSNCSPAFCNKRGICNNKHHCHCNYLWDPPNCLIKGYGGSVDSGPPPKRKKKKKFCYLCILLLIVLFILLCCLYRLCKKSKPIKKQQDVQTPSAKEEEKIQRRPHELPPQSQPWVMPSQSQPPVTPSQSHPRVMPSQSQPPVMPSQSHPQLTPSQSQPPVMPSQSHPQLTPSQSQPPVTPSQRQPQLMPSQSQPPVTPS

SEQ ID NO: 1253 - protein, 108 aa, Homo sapiens
MILQRLFRFSSVIRSAVSVHLRRNIGVTAVAFNKELDPIQKLFVDKIREYKSKRQTSGGPVDASSEYQQELERELFKLKQMFGNADMNTFPTFKFEDPKFEVIEKPQA

SEQ ID NO: 1254 - protein, 210 aa, Homo sapiens
MWTLGRRAVAGLLASPSPAQAQTLTRVPRPAELAPLCGRRGLRTDIDATCTPRRASSNQRGLNQIWNVKKQSVYLMNLRKSGTLGHPGSLDETTYERLAEETLDSLAEFFEDLADKPYTFEDYDVSFGSGVLTVKLGGDLGTYVINKQTPNKQIWLSSPSSGPKRYDWTGKNWVYSHDGVSLHELLAAELTKALKTKLDLSSLAYSGKDA

SEQ ID NO: 1255 - protein, 442 aa, Homo sapiens
MAGAATGSRTPGRSELVEGCGWRCPEHGDRVAELFCRRCRRCVCALCPVLGAHRGHPVGLALEAAVHVQKLSQECLKQLAIKKQQHIDNITQIEDATEKLKANAESSKTWLKGKFTELRLLLDEEEALAKKFIDKNTQLTLQVYREQADSCREQLDIMNDLSNRVWSISQEPDPVQRLQAYTATEQEMQQQMSLGELCHPVPLSFEPVKSFFKGLVEAVESTLQTPLDIRLKESINCQLSDPSSTKPGTLLKTSPSPERSLLLKYARTPTLDPDTMHARLRLSADRLTVRCGLLGSLGPVPVLRFDALWQVLARDCFATGRHYWEVDVQEAGAGWWVGAAYASLRRRGASAAARLGCNRQSWCLKRYDLEYWAFHDGQRSRLRPRDDLDRLGVFLDYEAGVLAFYDVTGGMSHLHTFRATFQEPLYPALRLWEGAISIPRLP

SEQ ID NO: 1256 - protein, 493 aa, Homo sapiens
MSKGPAVGIDLGTTYSCVGVFQHGKVEIIANDQGNRTTPSYVAFTDTERLIGDAAKNQVAMNPTNTVFDAKRLIGRRFDDAVVQSDMKHWPFMVVNDAGRPKVQVEYKGETKSFYPEEVSSMVLTKMKEIAEAYLGKTVTNAVVTVPAYFNDSQRQATKDAGTIAGLNVLRIINEPTAAAIAYGLDKKVGAERNVLIFDLGGGTFDVSILTIEDGIFEVKSTAGDTHLGGEDFDNRMVNHFIAEFKRKHKKDISENKRAVRRLRTACERAKRTLSSSTQASIEIDSLYEGIDFYTSITRARFEELNADLFRGTLDPVEKALRDAKLDKSQIHDIVLVGGSTRIPKIQKLLQDFFNGKELNKSINPDEAVAYGAAVQAAILSGDKSENVQDLLLLDVTPLSLGIETAGGVMTVLIKRNTTIPTKQTQTFTTYSDNQPGVLIQVYEGERAMTKDNNLLGKFELTGMPGGMPGGFPGGGAPPSGGASSGPTIEEVD

SEQ ID NO: 1257 - protein, 334 aa, Homo sapiens [sequence omitted]

SEQ ID NO: 1258 - protein, 430 aa, Homo sapiens
MSSRSPRPPPRRSRRRLPRPSCCCCCCRRSHLNEDTGRFVLLAALIGLYLVAGATVFSALESPGEAEARARWGATLRNFSAAHGVAEPELRAFLRHYEAALAAGVRADALRPRWDFPGAFYFVGTVVSTIGFGMTTPATVGGKAFLIAYGLFGCAGTILFFNLFLERIISLLAFIMRACRERQLRRSGLLPATFRRGSALSEADSLAGWKPSVYHVLLILGLFAVLLSCCASAMYTSVEGWDYVDSLYFCFVTFSTIGFGDLVSSQHAAYRNQGLYRLGNFLFILLGVCCIYSLFNVISILIKQVLNWMLRKLSCRCCARCCPAPGAPLARRNAITPGSRLRRRLAALGADPAARDSDAEGRRLSGELISMRDLTASNKVSLALLQKQLSETANGYPRSVCVNTRQNGFSGGVGALGIMNNRLAETSASR

SEQ ID NO: 1259 - protein, 901 aa, Homo sapiens
MAPTKPSFQQDPSRRERLQALRKEKSRDAARSRRGKENFEFYELAKLLPLPAAITSQLDKASIIRLTISYLKMRDFANQGDPPWNLRMEGPPPNTSVKGAQRRRSPSALAIEVFEAHLGSHILQSLDGFVFALNQEGKFLYISETVSIYLGLSQVELTGSSVFDYVHPGDHVEMAEQLGMKLPPGRGLLSQGTAEDGASSASSSSQSETPEPVESTSPSLLTTDNTLERSFFIRMKSTLTKRGVHIKSSGYKVIHITGRLRLRVSLSHGRTVPSQIMGLVVVAHALPPPTINEVRIDCHMFVTRVNMDLNIIYCENRISDYMDLTPVDIVGKRCYHFIHAEDVEGIRHSHLDLLNKGQCVTKYYRWMQKNGGYIWIQSSATIAINAKNANEKNIIWVNYLLSNPEYKDTPMDIAQLPHLPEKTSESSETSDSESDSKDTSGITEDNENSKSDEKGNQSENSEDPEPDRKKSGNACDNDMNCNDDGHSSSNPDSRDSDDSFEHSDFENPKAGEDGFGALGAMQIKVERYVESESDLRLQNCESLTSDSAKDSDSAGEAGAQASSKHQKRKKRRKRQKGGSASRRRLSSASSPGGLDAGLVEPPRLLSSPNSASVLKIKTEISEPINFDNDSSIWNYPPNREISRNESPYSMTKPPSSEHFPSPQGGGGGGGGGGGLHVAIPDSVLTPPGADGAAARKTQFGASATAALAPVASDPLSPPLSASPRDKHPGNGGGGGGGGGGAGGGGPSASNSLLYTGDLEALQRLQAGNVVLPLVHRVTGTLAATSTAAQRVYTTGTIRYAPAEVTLAMQSNLLPNAHAVNFVDVNSPGFGLDPKTPMEMLYHHVHRLNMSGPFGGAVSAASLTQMPAGNVFTTAEGLFSTLPFPVYSNGIHAAQTLERKED

SEQ ID NO: 1260 - protein, 563 aa, Homo sapiens
MWAVLRLALRPCARASPAGPRAYHGDSVASLGTQPDLGSALYQENYKQMKALVNQLHERVEHIKLGGGEKARALHISRGKLLPRERIDNLIDPGSPFLELSQFAGYQLYDNEEVPGGGIITGIGRVSGVECMIIANDATVKGGAYYPVTVKKQLRAQEIAMQNRLPCIYLVDSGGAYLPRQADVFPDRDHFGRTFYNQAIMSSKNIAQIAVVMGSCTAGGAYVPAMADENIIVRKQGTIFLAGPPLVKAATGEEVSAEDLGGADLHCRKSGVSDHWALDDHHALHLTRKVVRNLNYQKKLDVTIEPSEEPLFPADELYGIVGANLKRSFDVREVIARIVDGSRFTEFKAFYGDTLVTGFARIFGYPVGIVGNNGVLFSESAKKGTHFVQLCCQRNIPLLFLQNITGFMVGREYEAEGIAKDGAKMVAAVACAQVPKITLIIGGSYGAGNYGMCGRAYSPRFLYIWPNARISVMGGEQAANVLATITKDQRAREGKQFSSADEAALKEPIIKKFEEEGNPYYSSARVWDDGIIDPADTRLVLGLSFSAALNAPIEKTDFGIFRM

SEQ ID NO: 1261 - protein, 366 aa, Homo sapiens [sequence omitted]

SEQ ID NO: 1262 - protein, 196 aa, Homo sapiens
MEIISSKLFILLTLATSSLLTSNIFCADELVMSNLHSKENYDKYSEPRGYPKGERSLNFEELKDWGPKNVIKMSTPAVNKMPHSFANLPLRFGRNVQEERSAGATANLPLRSGRNMEVSLVRRVPNLPQRFGRTTTAKSVCRMLSDLCQGSMHSPCANDLFYSMTCQHQEIQNPDQKQSRRLLFKKIDDAELKQEK

SEQ ID NO: 1263 - protein, 128 aa, Homo sapiens
MAAFMLGSLLRTFKQMVPSSASGQVRSHYVDWRMWRDVKRRKMAYEYADERLRINSLRKNTILPKILQDVADEEIAALPRDSCPVRIRNRCVMTSRPRGVKRRWRLSRIVFRHLADHGQLSGIQRATW

SEQ ID NO: 1264 - protein, 131 aa, Homo sapiens
KDTPRLSLLLVILGVIFMNGNRASEAVLWEALRKMGLRPGVRHPFLGDLRKLITDDFVKQKYLEYKKIPNSNPPEYEFLWGLRARHETSKMRVLRFIAQNQNRDPREWKAHFLEAVDDAFKTMDVDMAEEH

SEQ ID NO: 1265 - protein, 175 aa, Homo sapiens [sequence omitted]

SEQ ID NO: 1266 - protein, 586 aa, Homo sapiens
MFAVVFFILSLMTCQPGVTAQEKVNQRVRRAATPAAVTCQLSNWSEWTDCFPCQDKKYRHRSLLQPNKFGGTICSGDIWDQASCSSSTTCVRQAQCGQDFQCKETGRCLKRHLVCNGDQDCLDGSDEDDCEDVRAIDEDCSQYEPIPGSQKAALGYNILTQEDAQSVYDASYYGGQCETVYNGEWRELRYDSTCERLYYGDDEKYFRKPYNFLKYHFEALADTGISSEFYDNANDLLSKVKKDKSDSFGVTIGIGPAGSPLLKFIFTRIFTKVQTAHFKMRKDDIMLDEGMLQSLMELPDQYNYGMYAKFINDYGTHYITSGSMGGIYEYILVIDKAKMESLGITSRDITTCFGGSLGIQYEDKINVGGGLSGDHCKKFGERARKAMAVEDIISRVRGGSSGWSGGLAQNRSTITYRSWGRSLKYNPVVIDFEMQPIHEVLRHTSLGPLEAKRQNLRRALDQYLMEFNACRCGPCFNNGVPILEGTSCRCQCRLGSLGAACEQTQTEGKEPKQMGAGVAGAPGLYAEQASRKGEESVTIQHLRMEGPRVQGGKYRRRLAEGLWTQAGPDAVDVDPCTDYWIKTSFN

SEQ ID NO: 1267 - protein, 4370 aa, Homo sapiens
VTHGLRAYDGLSLPEDIETVTASQMRWTHSYLSDDEDMLADSISGDDLGSGDLGSGDFQMVYFRALVNFTRSIEYSPQLEDAGSREFREVSEAVVDTLESEYLKIPGDQVVSVVFIKELDGWVFVELDVGSEGNADGAQIQEMLLRVISSGSVASYVTSPQGFQFRRLGTVPQFPRACTEAEFACHSYNECVALEYRCDRRPDCRDMSDELNCEEPVLGISPTFSLLVETTSLPPRPETTIMRQPPVTHAPQPLLPGSVRPLPCGPQEAACRNGHCIPRDYLCDGQEDCEDGSDELDCGPPPPCEPNEFPCGNGHCALKLWRCDGDFDCEDRTDEANCPTKRPEEVCGPTQFRCVSTNMCIPASFHCDEESDCPDRSDEFGCMPPQVVTPPRESIQASRGQTVTFTCVAIGVPTPIINWRLNWGHIPSHPRVTVTSEGGRGTLIIRDVKESDQGAYTCEAMNARGMVFGIPDGVLELVPQRGPCPDGHFYLEHSAACLPCFCFGITSVCQSTRRFRDQIRLRFDQPDDFKGVNVTMPAQPGTPPLSSTQLQIDPSLHEFQLVDLSRRFLVHDSFWALPEQFLGNKVDSYGGSLRYNVRYELARGMLEPVQRPDVVLVGAGYRLLSRGHTPTQPGALNQRQVQFSEEHWVHESGRPVQRAELLQVLQSLEAVLIQTVYNTKMASVGLSDIAMDTTVTHATSHGRAHSVEECRCPIGYSGLSCESCDAHFTRVPGGPYLGTCSGCSCNGHASSCDPVYGHCLNCQHNTEGPQCNKCKAGFFGDAMKATATSCRPCPCPYIDASRRFSDTCFLDTDGQATCDACAPGYTGRRCESCAPGYEGNPIQPGGKCRPVNQEIVRCDERGSMGTSGEACRCKNNVVGRLCNECADGSFHLSTRNPDGCLKCFCMGVSRHCTSSSWSRAQLHGASEEPGHFSLTNAASTHTTNEGIFSPTPGELGFSSFHRLLSGPYFWSLPSRFLGDKVTSYGGELRFTVTQRSQPGSTPLHGQPLVVLQGNNIILEHHVAQEPSPGQPSTFIVPFREQAWQRPDGQPATREHLLMALAGIDTLLIRASYAQQPAESRVSGISMDVAVPEETGQDPALEVEQCSCPPGYRGPSCQDCDTGYTRTPSGLYLGTCERCSCHGHSEACEPETGACQGCQHHTEGPRCEQCQPGYYGDAQRGTPQDCQLCPCYGDPAAGQAAHTCFLDTDGHPTCDACSPGHSGRHCERCAPGYYGNPSQGQPCQRDSQVPGPIGCNCDPQGSVSSQCDAAGQCQCKAQVEGLTCSHCRPHHFHLSASNPDGCLPCFCMGITQQCASSAYTRHLISTHFAPGDFQGFALVNPQRNSRLTGEFTVEPVPEGAQLSFGNFAQLGHESFYWQLPETYQGDKVAAYGGKLRYTLSYTAGPQGSPLSDPDVQITGNNIMLVASQPALQGPERRSYEIMFREEFWRRPDGQPATREHLLMALADLDELLIRATFSSVPLVASISAVSLEVAQPGPSNRPRALEVEECRCPPGYIGLSCQDCAPGYTRTGSGLYLGHCELCECNGHSDLCHPETGACSQCQHNAAGEFCELCAPGYYGDATAGTPEDCQPCACPLTNPENMFSRTCESLGAGGYRCTACEPGYTGQYCEQCGPGYVGNPSVQGGQCLPETNQAPLVVEVHPARSIVPQGGSHSLRCQVSGSPPHYFYWSREDGRPVPSGTQQRHQGSELHFPSVQPSDAGVYICTCRNLHQSNTSRAELLVTEAPSKPITVTVEEQRSQSVRPGADVTFICTAKSKSPAYTLVWTRLHNGKLPTRAMDFNGILTIRNVQLSDAGTYVCTGSNMFAMDQGTATLHVQASGTLSAPVVSIHPPQLTVQPGQLAEFRCSATGSPTPTLEWTGGPGGQLPAKAQIHGGILRLPAVEPTDQAQYLCRAHSSAGQQVARAVLHVHGGGGPRVQVSPERTQVHAGRTVRLYCRAAGVPSATITWRKEGGSLPPQARSERTDIATLLIPAITTADAGFYLCVATSPAGTAQARIQVVVLSASDASPPPVKIESSSPSVTEGQTLDLNCVVAGSAHAQVTWYRRGGSLPPHTQVHGSRLRLPQVSPADSGEYVCRVENGSGPKEASITVSVLHGTHSGPSYTPVPGSTRPIRIEPSSSHVAEGQTLDLNCVVPGQAHAQVTWHKRGGSLPARHQTHGSLLRLHQVTPADSGEYVCHVVGTSGPLEASVLVTIEASVIPGPIPPVRIESSSSTVAEGQTLDLSCVVAGQAHAQVTWYKRGGSLPARHQVRGSRLYIFQASPADAGQYVCRASNGMEASITVTVTGTQGANLAYPAGSTQPIRIEPSSSQVAEGQTLDLNCVVPGQSHAQVTWHKRGGSLPVRHQTHGSLLRLYQASPADSGEYVCRVLGSSVPLEASVLVTIEPAGSVPALGVTPTVRIESSSSQVAEGQTLDLNCLVAGQAHAQVTWHKRGGSLPARHQVHGSRLRLLQVTPADSGEYVCRVVGSSGTQEASVLVTIQQRLSGSHSQGVAYPVRIESSSASLANGHTLDLNCLVASQAPHTITWYKRGGSLPSRHQIVGSRLRIPQVTPADSGEYVCHVSNGAGSRETSLIVTIQGSGSSHVPSVSPPIRIESSSPTVVEGQTLDLNCVVARQPQAIITWYKRGGSLPSRHQTHGSHLRLHQMSVADSGEYVCRANNNIDALEASIVISVSPSAGSPSAPGSSMPIRIESSSSHVAEGETLDLNCVVPGQAHAQVTWHKRGGSLPSHHQTRGSRLRLHHVSPADSGEYVCRVMGSSGPLEASVLVTIEASGSSAVHVPAPGGAPPIRIEPSSSRVAEGQTLDLKCVVPGQAHAQVTWHKRGGNLPARHQVHGPLLRLNQVSPADSGEYSCQVTGSSGTLEASVLVTIEPSSPGPIPAPGLAQPIYIEASSSHVTEGQTLDLNCVVPGQAHAQVTWYKRGGSLPARHQTHGSQLRLHLVSPADSGEYVCRAASGPGPEQEASFTVTVPPSEGSSYRLRSPVISIDPPSSTVQQGQDASFKCLIHDGAAPISLEWKTRNQELEDNVHISPNGSIITIVGTRPSNHGTYRCVASNAYGVAQSVVNLSVHGPPTVSVLPEGPVWVKVGKAVTLECVSAGEPRSSARWTRISSTPAKLEQRTYGLMDSHAVLQISSAKPSDAGTYVCLAQNALGTAQKQVEVIVDTGAMAPGAPQVQAEEAELTVEAGHTATLRCSATGSPAPTIHWSKLRSPLPWQHRLEGDTLIIPRVAQQDSGQYICNATSPAGHAEATIILHVESPPYATTVPEHASVQAGETVQLQCLAHGTPPLTFQWSRVGSSLPGRATARNELLHFERAAPEDSGRYRCRVTNKVGSAEAFAQLLVQGPPGSLPATSIPAGSTPTVQVTPQLETKSIGASVEFHCAVPSDRGTQLRWFKEGGQLPPGHSVQDGVLRIQNLDQSCQGTYICQAHGPWGKAQASAQLVIQALPSVLINIRTSVQTVVVGHAVEFECLALGDPKPQVTWSKVGGHLRPGIVQSGGVVRIAHVELADAGQYRCTATNAAGTTQSHVLLLVQALPQISMPQEVRVPAGSAAVFPCIASGYPTPDISWSKLDGSLPPDSRLENNMLMLPSVRPQDAGTYVCTATNRQGKVKAFAHLQVPERVVPYFTQTPYSFLPLPTIKDAYRKFEIKITFRPDSADGMLLYNGQKRVPGSPTNLANRQPDFISFGLVGGRPEFRFDAGSGMATIRHPTPLALGHFHTVTLLRSLTQGSLIVGDLAPVNGTSQGKFQGLDLNEELYLGGYPDYGAIPKAGLSSGFIGCVRELRIQGEEIVFHDLNLTAHGISHCPTCRDRPCQNGGQCHDSESSSYVCVCPAGFTGSRCEHSQALHCHPEACGPDATCVNRPDGRGYTCRCHLGRSGLRCEEGVTVTTPSLSGAGSYLALPALTNTHHELRLDVEFKPLAPDGVLLFSGGKSGPVEDFVSLAMVGGHLEFRYELGSGLAVLRSAEPLALGRWHRVSAERLNKDGSLRVNGGRPVLRSSPGKSQGLNLHTLLYLGGVEPSVPLSPATNMSAHFRGCVGEVSVNGKRLDLTYSFLGSQGIGQCYDSSPCERQPCQHGATCMPAGEYEFQCLCRDGFKGDLCEHEENPCQLREPCLHGGTCQGTRCLCLPGFSGPRCQQGSGHGIAESDWHLEGSGGNDAPGQYGAYFHDDGFLAFPGHVFSRSLPEVPETIELEVRTSTASGLLLWQGVEVGEAGQGKDFISLGLQDGHLVFRYQLGSGEARLVSEDPINDGEWHRVTALREGRRGSIQVDGEELVSGRSPGPNVAVNAKGSVYIGGAPDVATLTGGRFSSGITGCVKNLVLHSARPGAPPPQPLDLQHRAQAGANTRPCPS

SEQ ID NO: 1268 - protein, 1001 aa, Homo sapiens
MGNSYAGQLKTTRFEEVLHNSIEASLRSNNLVPRPIFSQLYLEAEQQLAALEGGSRVDNEEEEEEGEGGLETNGPPNPFQLHPLPEGCCTTDGFCQAGKDLRLVSISNEPMDVPAGFLLVGVKSPSLPDHLLVCAVDKRFLPDDNGHNALLGFSGNCVGCGKKGFCYFTEFSNHINLKLTTQPKKQKHLKYYLVRNAQGTLTKGPLICWKGSEFRSRQIPASTCSSSLFPALESTAAFPSEPVPGTNPSILMGAQQAGPASDHPSLNAAMGPAVFNGKDSPKCQQLAKNNLLALPRPSALGILSNSGPPKKRHKGWSPESPSAPDGGCPQGGGNRAKYESAGMSCVPQVGLVGPASVTFPVVASGEPVSVPDNLLKICKAKPVIFKGHGNFPYLCGNLNDVVVSPLLYTCYQNSQSVSRAYEQYGASAIQPISEEMQLLLTVYYLVQLAADQVPLMEDLEQIFLRSWRESHLTEIRQYQQAPPQPFPPAPSAAAPVTSAQLPWLASLAASSCNDSVHVIECAYSLAEGLSEMFRLLVEGKLAKTNYVVIICACRSAAIDSCIAVTGKYQARILSESLLTPAEYQKEVNYELVTGKVDSLGAFFSTLCPEGDIDILLDKFHQENQGHISSSLAASSVTKAASLDVSGTPVCTSYNLEPHSIRPFQLAVAQKLLSHVCSIADSSTQNLDLGSFEKVDFLICIPPSEVTYQQTLLHVWHSGVLLELGLKKEHMTKQRVEQYVLKLDTEAQTKFKAFLQNSFQNPHTLFVLIHDHAHWDLVSSTVHNLYSQSDPSVGLVDRLLNCREVKEAPNIVTLHVTSFPYALQTQHTLSSPYNEIHWPASCSNGVDLYHENKKYFGLSEFIESTLSGHSLPLLRYDSSFEAMVTALGKRFPRLHSAVIRTFVLVQHYAAALMAVSGLPQMKNYTSVETLEITQNLLNSPKQCPCGHGLMVLLRVPCSPLAVVAYERLAHVRARLALEEHFEIILGSPSSGVTVGKHFVKQL

SEQ ID NO: 1269 - protein, 80 aa, Homo sapiens
MATPTQTPTKAPEEPDPFYYDYNTVQTVGMTLATILFLLGILIVISKKVKCRKADSRSESPTCKSCKSELPSSAPGGGGV

SEQ ID NO: 1270 - protein, 92 aa, Homo sapiens
MASLGHILVFCVGLLTMAKAESPKEHDPFTYDYQSLQIGGLVIAGILFILGILIVLSRRCRCKFNQQQRTGEPDEEEGTFRSSIRRLSTRRR

SEQ ID NO: 1271 - protein, 475 aa, Homo sapiens
MTTILTYPFKNLPTASKWALRFSIRPLSCSSQLRAAPAVQTKTKKTLAKPNIRNVVVVDGVRTPFLLSGTSYKDLMPHDLARAALTGLLHRTSVPKEVVDYIIFGTVIQEVKTSNVAREAALGAGFSDKTPAHTVTMACISANQAMTTGVGLIASGQCDVIVAGGVELMSDVPIRHSRKMRKLMLDLNKAKSMGQRLSLISKFRFNFLAPELPAVSEFSTSETMGHSADRLAAAFAVSRLEQDEYALRSHSLAKKAQDEGLLSDVVPFKVPGKDTVTKDNGIRPSSLEQMAKLKPAFIKPYGTVTAANSSFLTDGASAMLIMAEEKALAMGYKPKAYLRDFMYVSQDPKDQLLLGPTYATPKVLEKAGLTMNDIDAFEFHEAFSGQILANFKAMDSDWFAENYMGRKTKVGLPPLEKFNNWGGSLSLGHPFGATGCRLVMAAANRLRKEGGQYGLVAACAAGGQGHAMIVEAYPK

SEQ ID NO: 1272 - protein, 248 aa, Homo sapiens
MRPVRLMKVFVTRRIPAEGRVALARAADCEVEQWDSDEPIPAKELERGVAGAHGLLCLLSDHVDKRILDAAGANLKVISTMSVGIDHLALDEIKKRGIRVGYTPDVLTDTTAELAVSLLLTTCRRLPEAIEEVKNGGWTSWKPLWLCGYGLTQSTVGIIGLGRIGQAIARRLKPFGVQRFLYTGRQPRPEEAAEFQAEFVSTPELAAQSDFIVVACSLTPATEGLCNKDFFQKMKEQLCSSTSAGATS

SEQ ID NO: 1273 - protein, 366 aa, Homo sapiens
MLPSLQESMDGDEKELESSEEGGSAEERRLEPPSSSHYCLYSYRGSRLAQQRGDSEDGSPSGTNAETPSGDDFSLSLADTNLPSEVEPELRSFIAKRLSRGAVFEGLGNVASVELKIPGYRVGCYYCLFQNEKLLPETVTIDSERNPSEYVVCFLGGSEKGLELFRLELDKYIQGLKNNMNCEARGLESHIKSYLSSWFEDVVCPIQRVVLLFQEKLTFLLHAALSYTPVEVKESDEKTKRDINRFLSVASLQGLIHEGTMTSLCMAMTEEQHKSVVIDCSSSQPQFCNAGSNRFCEDWMQAFLNGAKGGNPFFFRQVLENFKLKAIQDTNNLKRFIRQAEMNHYALFKCYMFLKNCGSGDTFEDC

SEQ ID NO: 1274 - protein, 402 aa, Homo sapiens
MMVHCAGCERPILDRFLLNVLDRAWHIKCVQCCECKTNLSEKCFSREGKLYCKNDFFRRFGTKCAGCAQGISPSDLVRKARSKVFHLNCFTCMVCNKQLSTGEELYVIDENKFVCKDDYLSSSSLKEGSLNSVSSCTDRSLSPDLQDALQDDPKETDNSTSSDKETANNENEEQNSGTKRRGPRTTIKAKQLETLKAAFAATPKPTRHIREQLAQETGLNMRVIQVWFQNRRSKERRMKQLSALGARRHAFFRSPRRMRPLGGRLDESEMLGSTPYTYYGDYQGDYYAPGSNYDFFAHGPPSQAQSPADSSFLAASGPGSTPLGALEPPLAGPHAADNPRFTDMISHPDTPSPEPGLPGTLHPMPGEVFSGGPSPPFPMSGTSGYSGPLSHPNPELNEAAVW

SEQ ID NO: 1275 - protein, 580 aa, Homo sapiens
MEVPQPEPAPGSALSPAGVCGGAQRPGHLPGLLLGSHGLLGSPVRAAASSPVTTLTQTMHDLAGLGSETPKSQVGTLLFRSRSRLTHLSLSRRASESSLSSESSESSDAGLCMDSPSPMDPHMAEQTFEQAIQAASRIIRNEQFAIRRFQSMPVRLLGHSPVLRNITNSQAPDGRRKSEAGSGAASSSGEDKENDGFVFKMPWKPTHPSSTHALAEWASRREAFAQRPSSAPDLMCLSPDRKMEVEELSPLALGRFSLTPAEGDTEEDDGFVDILESDLKDDDAVPPGMESLISAPLVKTLEKEEEKDLVMYSKCQRLFRSPSMPCSVIRPILKRLERPQDRDTPVQNKRRRSVTPPEEQQEAEEPKARVLRSKSLCHDEIENLLDSDHRELIGDYSKAFLLQTVDGKHQDLKYISPETMVALLTGKFSNIVDKFVIVDCRYPYEYEGGHIKTAVNLPLERDAESFLLKSPIAPCSLDKRVILIFHCEFSSERGPRMCRFIRERDRAVNDYPSLYYPEMYILKGGYKEFFPQHPNFCEPQDYRPMNHEAFKDELKTFRLKTRSWAGERSRRELCSRLQDQ

SEQ ID NO: 1276 - protein, 298 aa, Homo sapiens
MTEPGASPEDPWVKASPVGAHAGEGRAGRARARRGAGRRGASLLSPKSPTLSVPRGCREDSSHPACAKVEYAYSDNSLDPGLFVESTRKGSVVSRANSIGSTSASSVPNTDDEDSDYHQEAYKESYKDRRRRAHTQAEQKRRDAIKRGYDDLQTIVPTCQQQDFSIGSQKLSKAIVLQKTIDYIQFLHKEKKKQEEEVSTLRKDVTALKIMKVNYEQIVKAHQDNPHEGEDQVSDQVKFNVFQGIMDSLFQSFNASISVASFQELSACVFSWIEEHCKPQTLREIVIGVLHQLKNQLY

SEQ ID NO: 1277 - protein, 126 aa, Homo sapiens
GPLLWVGPLKRLGRHRGRLEALLPGGDTQSRRHRGAGCVRWLAGAALPCSLAPGCGAAAGASPCPGAGRRRAAGRRCLACECTSLTCAGESGKSTIVKQMRILHVNGFNGEGGEEDPQAARSNSDG

SEQ ID NO: 1278 - protein, 715 aa, Homo sapiens [sequence omitted]

SEQ ID NO: 1279 - protein, 470 aa, Homo sapiens [sequence omitted]

SEQ ID NO: 1280 - protein, 740 aa, Homo sapiens
MATANSIIVLDDDDEDEAAAQPGPSHPLPNAASPGAEAPSSSEPHGARGSSSSGGKKCYKLENEKLFEEFLELCKMQTADHPEVVPFLYNRQQRAHSLFLASAEFCNILSRVLSRARSRPAKLYVYINELCTVLKAHSAKKKLNLAPAATTSNEPSGNNPPTHLSLDPTNAENTASRSPRTRGSRRQIQRLEQLLALYVAEIRRLQEKELDLSELDDPDSAYLQEARLKRKLIRLFGRLCELKDCSSLTGRVIEQRIPYRGTRYPEVNRRIERLINKPGPDTFPDYGDVLRAVEKAAARHSLGLPRQQLQLMAQDAFRDVGIWLQERRHLDLIYNFGCHLTDDYRPGVDPALSDPVLARRLRENQSLAMSRLDEVISKYAMSQDKSEEGERKKRRARLQGTSSHSADTPEASLDSGEGPSGMASQGCPSASRAETDDEDDEESDEEEEEEEEEEEEEATDSEEEEDLEQMQEGQEDDEEEDEEEEAAAGKDGDKSPMSSLQISNEKNLEPGKQISRSSGEQQNKGRIVSPSLLSEEPLAPSSIDAESNGEQPEELTLEEESPVSQLFELEIEALPLDTPSSVETDISSSRKQSEEPFTTVLENGAGMVSSTSFNGGVSPHNWGDSGPPCKKSRKEKKQTGSGPLGNSYVERQRSVHEKNGKKICTLPSPPSPLASLAPVADSSTRVDSPSHGLVTSSLCIPSPARLSQTPHSQPPRPGTCKTSVATQCDPEEIIVLSDSD

SEQ ID NO: 1281 - protein, 359 aa, Homo sapiens
MDEQDLNEPLAKVSLLKDDLQGAQSETEAKQEIQHLRKELIEAQELARASKQKCFELQALLEEERKAYRNQVEESTKQIQVLQAQLQRLHIDTENLREEKDSEITSTRDELLSARDEILLLHQAAAKVASERDTDIASLQEELKKVRAELERWRKAASEYEKEITSLQNSFQLRCQQCEDQQREEATRLQGELEKLRKEWNALETECHSLKRENVLLSSELQRQEKELHNSQKQSLELTSDLSILQMSRKELENQVGSLKEQHLRDSADLKTLLSKAENQAKDVQKEYEKTQTVLSELKLKFEMTEQEKQSITDELKQCKNNLKLLREKGNNPSILQPVPAVFIGLFLAFLFWCFGPLW

SEQ ID NO: 1282 - protein, 392 aa, Homo sapiens
MDALVEDDICILNHEKAHKRDTVTPVSIYSGDESVASHFALVTAYEDIKKRLKDSEKENSLLKKRIRFLEEKLIARFEEETSSVGREQVNKAYHAYREVCIDRDNLKSKLDKMNKDNSESLKVLNEQLQSKEVELLQLRTEVETQQVMRNLNPPSSNWEVEKLSCDLKIHGLEQELELMRKECSDLKIELQKAKQTDPYQEDNLKSRDLQKLSISSDNMQHAYWELKREMSNLHLVTQVQAELLRKLKTSTAIKKACAPVGCSEDLGRDSTKLHLMNFTATYTRHPPLLPNGKALCHTTSSPLPGDVKVLSEKAILQSWTDNERSIPNDGTCFQEHSSYGRNSLEDNSWVFPSPPKSSETAFGETKTKTLPLPNLPPLHYLDQHNQNCLYKN

SEQ ID NO: 1283 - protein, 2161 aa, Homo sapiens
MTHSPATSEDEERHSASECPEGGSESDSSPDGPGRGPRGTRGQGSGAPGSLASVRGLQGRSMSVPDDAHFSMMVFRIGIPDLHQTKCLRFNPDATIWTAKQQVLCALSESLQDVLNYGLFQPATSGRDANFLEEERLLREYPQSFEKGVPYLEFRYKTRVYKQTNLDEKQLAKLHTKTGLKKFLEYVQLGTSDKVARLLDKGLDPNYHDSDSGETPLTLAAQTEGSVEVIRTLCLGGAHIDFRARDGMTALHKAACARHCLALTALLDLGGSPNYKDRRGLTPLFHTAMVGGDPRCCELLLFNRAQLGIADENGWQEIHQACQRGHSQHLEHLLFYGAEPGAQNASGNTALHICALYNKETCARILLYRGADKDVKNNNGQTPFQVAVIAGNFELGELIRNHREQDVVPFQESPKYAARRRGPPGTGLTVPPALLRANSDTSMALPDWMVFSAPGAASSGAPGPTSGSQGQSQPSAPTTKLSSGTLRSASSPRGARARSPSRGRHPEDAKRQPRGRPSSSGTPREGPAGGTGGSGGPGGSLGSRGRRRKLYSAVPGRSFMAVKSYQAQAEGEISLSKGEKIKVLSIGEGGFWEGQVKGRVGWFPSDCLEEVANRSQESKQESRSDKAKRLFRHYTVGSYDSFDAPSLMDGIGPGSDYIIKEKTVLLQKKDSEGFGFVLRGAKAQTPIEEFTPTPAFPALQYLESVDEGGVAWRAGLRMGDFLIEVNGQNVVKVGHRQVVNMIRQGGNTLMVKVVMVTRHPDMDEAVHKKAPQQAKRLPPPTISLRSKSMTSELEEMEYEQQPAPVPSMEKKRTVYQMALNKLDEILAAAQQTISASESPGPGGLASLGKHRPKGFFATESSFDPHHRAQPSYERPSFLPPGPGLMLRQKSIGAAEDDRPYLAPPAMKFSRSLSVPGSEDIPPPPTTYPPEPPYSTPTVPSSSGRLTPSPRGGPFNPGSGGPLPASSPATFDGPSPPDTRVGSREKSLYHSGPLPPAHHHPPHHHHHHAPPPQPHHHHAHPPHPPEMETGGSPDDPPPRLALGPQPSLRGWRGGGPSPTPGAPSPSHHGSAGGGGGSSQGPALRYIQLPPRAASAAMYVPARSGRGRKGPLVKQTKVEGEPQKGGGLPPAPSPSSPASPQPPPAVAAPSEKNSIPIPTIIIKAPSTSSSGRSSQGSSTEAEPPTQPEPTGGGGGGGSSPSPAPAMSPVPPSPSPVPTPASPSGPATLDFTSQFGAALVGAARREGGWQNEARRRSTLFLSTDAGDEDGGDGGLGTGAAPGPRLRHSKSIDEGMFSAEPYLRLESAGSGAGYGGYGAGSRAYGGGGGSSAFTSFLPPRPLVHPLTGKALDPASPLGLALAARERALKESSEGGGAPQPPPRPPSPRYEAPPPTPHHHSPHAHHEPVLRLWGASPPDPARRELGYRAGLGSQEKSLPASPPAARRSLLHRLPPTAPGVGPLLLQLGTEPPAPHPGVSKPWRSAAPEEPERLPLHVRFLENCQPRAPVTSGRGPPSEDGPGVPPPSPRRSVPPSPTSPRASEENGLPLLVLPPPAPSVDVEDGEFLFVEPLPPPLEFSNSFEKPESPLTPGPPHPLPDTPAPATPLPPVPPPAVAAAPPTLDSTASSLTSYDSEVATLTQGASAAPGDPHPPGPPAPAAPAPAAPQPGPDPPPGTDSGIEEVDSRSSSDHPLETISSASTLSSLSAEGGGSAGGGGGAGAGVASGPELLDTYVAYLDGQAFGGSSTPGPPYPPQLMTPSKLRGRALGASGGLRPGPSGGLRDPVTPTSPTVSVTGAGTDGLLALRACSGPPTAGVAGGPVAVEPEVPPVPLPTASCLPRKLLPWEEGPGPPPPPLPGPLAQPQASALATVKASIISELSSKLQQFGGSSAAGGALPWARGGSGGGGDSHHGGASYVPERTSSLQRQRLSDDSQSSLLSKPVSSLFQNWPKPPLPPLPTGTGVSPTAAAAPGATSPSASSSSTSTRHLQGVEFEMRPPLLRRAPSPSLLPASEHKVSPAPRPSSLPILPSGPLYPGLFDIRGSPTGGAGGSADPFAPVFVPPHPGISGGLGGALSGASRSLSPTRLLSLPPDKPFGAKPLGFWTKFDVADWLEWLGLAEHRAQFLDHEIDGSHLPALTKEDYVDLGVTRVGHRMNIDRALKFFLER

SEQ ID NO: 1284 - protein, 417 aa, Homo sapiens
MSLSKKLTLDKLDVRGKRVIMRVDFNVPMKKNQITNNQRIKASIPSIKYCLDNGAKAVVLMSHLGRPDGVPMPDKYSLAPVAVELKSLLGKDVLFLKDCVGAEVEKACANPAPGSVILLENLRFHVEEEGKGQDPSGKKIKAEPDKIEAFRASLSKLGDVYVNDAFGTAHRAHSSMVGVNLPHKASGFLMKKELDYFAKALENPVRPFLAILGGAKVADKIQLIKNMLDKVNEMIIGGGMAYTFLKVLNNMEIGASLFDEEGAKIVKDIMAKAQKNGVRITFPVDFVTGDKFDENAQVGKATVASGISPGWMGLDCGPESNKNHAQVVAQARLIVWNGPLGVFEWDAFAKGTKALMDEIVKATSKGCITVIGGGDTATCCAKWNTEDKVSHVSTGGGASLELLEGKILPGVEALSNM

SEQ ID NO: 1285 - protein, 316 aa, Homo sapiens
MPTFNGSVFMPSAFILIGIPGLESVQCWIGIPFSAMYLIGVIGNSLILVIIKYENSLHIPMYIFLAMLAATDIALNTCILPKMLGIFWFHLPEISFDACLFQMWLIHSFQAIESGILLAMALDRYVAICIPLRHATIFSQQFLTHIGLGVTLRAAILIIPSLGLIKCCLKHYRTTVISHSYCEHMAIVKLATEDIRVNKIYGLFVAFAILGFDIIFITLSYVQIFITVFQLPQKEARFKAFNTCIAHICVFLQFYLLAFFSFFTHRFGSHIPPYIHILLSNLYLLVPPFLNPIVYGVKTKQIRDHIVKVFFFKKVT

SEQ ID NO: 1286 - protein, 161 aa, Homo sapiens [sequence omitted]

SEQ ID NO: 1287 - protein, 76 aa, Homo sapiens
MSEPQPRGAERDLYRDTWVRYLGYANEVGEAFRSLVPAAVVWLSYGVASSYVLADAIDKGKKAGECPALKQAAAPG

SEQ ID NO: 1288 - protein, 180 aa, Homo sapiens
MFKVIQRSVGPASLSLLTFKVYAAPKKDSPPKNSVKVDELSLYSVPEGQSKYVEEARSQLEESISQLRHYCEPYTTWCQTAMTISKMHLLDFFPRLGVIGFAGLIGLLLARGSKIKKLVYPPGFMGLAASLYYPQQAIVFAQVSGERLYDWGLRGYIVIEDLWKENFQKPGNVKNSPGTK

SEQ ID NO: 1289 - protein, 168 aa, Homo sapiens
MAPLGTTVLLWSLLRSSPGVERVCFRARIQPWHGGLLQPLPCSFEMGLPRRRFSSEAESGSPETKKPTFMDEEVQSILTKMTGLNLQKTFKPAIQELKPPTYKLMTQAQLEEATRQAVEAAKVRLKMPPVLEERVPINDVLAEDKILEGTETTKYVFTDISYSIPHRC

SEQ ID NO: 1290 - protein, 227 aa, Homo sapiens
MEKLFNENEGMPSNQGKIDNEEQPPHEGKPEVACILEDKKLENEGNTENTGKRVEEPLKDKEKPESAGKAKGEGKSERKGKSEMQGGSKTEGKPERGGRAEGEGEPDSEREPESEGEPESETRAAGKRPAEDDIPRKAKRKTNKGLAQYLKQYKEAIHDMNFSNEDMIREFDNMARVEDKRRKSKQKLGAFLWMQRNLQDPFYPRGPREFRGGCRAPRRDTEDIPYV

SEQ ID NO: 1291 - protein, 469 aa, Homo sapiens [sequence omitted]

SEQ ID NO: 1292 - protein, 539 aa, Homo sapiens [sequence omitted]

SEQ ID NO: 1293 - protein, 211 aa, Homo sapiens [sequence omitted]

SEQ ID NO: 1294 - protein, 227 aa, Homo sapiens
MQEPRRVTHCLGKRGVKTPQLQPGSAFLPRVRRQSFTARSDSYTTVRDFLAVPRTISSASATLIMAVAVSHFRPGPEVWDTASMAASKVKQDMPPPGGYGPIDYKRNLPRRGLSGYSMLAIGIGTLIYGHWSIMKWNRERRRLQIEDFEARIALLPLLQAETDRRTLQMLRENLEEEAIIMKDVPDWKVGESVFHTTRWVPPLIGELYGLRTTEEALHASHGFMWYT

SEQ ID NO: 1295 - protein, 427 aa, Homo sapiens
MGKEKTHINIVVIGHVDSGKSTTTGHLIYKCGGIDKRTIEKFEKEAAEMGKGSFKYAWVLDKLKAERERGITIDISLWKFETSKYYVTIIDAPGHRDFIKNMITGTSQADCAVLIVAAGVGEFEAGISKNGQTREHALLAYTLGVKQLIVGVNKMDSTEPPYSQKRYEEIVKEVSTYIKKIGYNPDTVAFVPISGWNGDNMLEPSANMPWFKGWKVTRKDGNASGTTLLEALDCILPPTRPTDKPLRLPLQDVYKIGGIGTVPVGPSGDWCSQPGMVVTFAPVNVTTEVKSVEMHHEALSEALPGDNVGFNVKNVSVKDVRRGNVAGDSKNDPPMEAAGFTAQVIILNHPGQISAGYAPVLDCHTAHIACKFAELKEKIDRRSGKKLEDGPKFLKSGDAAIVDMVPGKPMCVESFSDYPPLGSLCCS

SEQ ID NO: 1296 - protein, 119 aa, Homo sapiens [sequence omitted]

SEQ ID NO: 1297 - protein, 736 aa, Homo sapiens
MSLLFSRCNSIVTVKKNKRHMAEVNASPLKHFVTAKKKINGIFEQLGAYIQESATFLEDTYRNAELDPVTTEEQVLDVKGYLSKVRGISEVLARRHMKVAFFGRTSNGKSTVINAMLWDKVLPSGIGHTTNCFLRVEGTDGHEAFLLTEGSEEKRSAKTVNQLAHALHQDKQLHAGSLVSVMWPNSKCPLLKDDLVLMDSPGIDVTTELDSWIDKFCLDADVFVLVANSESTLMQTEKHFFHKVRRQHMERCTSFLVDELGVVDRSQAGDRIFFVSAKEVLNARIQKAQGMPEGGGALAEGFQVRMFEFQNFERRFEECISQSAVKTKFEQHTVRAKQIAEAVRLIMDSLHMAAREQQVYCEEMREERQDRLKFIDKQLELLAQDYKLRIKQITEEVERQVSTAMAEEIRRLSVLVDDYQMDFHPSPVVLKVYKNELHRHIEEGLGRNMSDRCSTAITNSLQTMQQDMIDGLKPLLPVSVRSQIDMLVPRQCFSLNYDLNCDKLCADFQEDIEFHFSLGWTMLVNRFLGPKNSRRALMGYNDQASKVPHLKGIVGGPASHPSDASQPQHAPTATGLAHPGGVHGFHGYRPGLLDIQDLHGHSCCWRSVGWRLIALSFGLYGLLYVYERLTWTTKAKERAFKRQFVEHASEKLQLVISYTGSNCSHQVQQELSGTFAHLCQQVDVTRENLEQEIAAMNKKIEVLDSLQSKAKLLRNKAGWLDSELNMFTHQYLQPSR

SEQ ID NO: 1298 - protein, 521 aa, Homo sapiens [sequence omitted]

SEQ ID NO: 1299 - protein, 394 aa, Homo sapiens [sequence omitted]

SEQ ID NO: 1300 - protein, 179 aa, Homo sapiens [sequence omitted]

SEQ ID NO: 1301 - protein, 200 aa, Homo sapiens
MAKKTYDLLFKLLLIGDSGVGKTCVLFRFSDDAFNTTFISTIGIDFKIKTVELQGKKIKLQIWDTAGQERFHTITTSYYRGAMGIMLVYDITNGKSFENISKWLRNIDEHANEDVERMLLGNKCDMDDKRVVPKGKGGQIAREHGIRFFETSAKANINIEKAFLTLAEDILRKTPVKEPNSENVDISSGGGVTGWKSKCC

SEQ ID NO: 1302 - protein, 541 aa, Homo sapiens [sequence omitted]

SEQ ID NO: 1303 - protein, 344 aa, Homo sapiens [sequence omitted]

SEQ ID NO: 1304 - protein, 286 aa, Homo sapiens
MAMEGYRRFLALLGSALLVGFLSVIFALVWVLHYREGLGWDGSALEFNWHPVLMVTGFVFIQGIAIIVYRLPWTWKCSKLLMKSIHAGLNAVAAILAIISVVAVFENHNVNNIANMYSLHSWVGLIAVICYLLQLLSGFSVFLLPWAPLSLRAFLMPIHVYSGIVIFGTVIATALMGLTEKLIFSLRDPAYSTFPPEGVFVNTLGLLILVFGALIFWIVTRPQWKRPKEPNSTILHPNGGTEQGARGSMPAYSGNNMDKSDSELNNEVAARKRNLALDEAGQRSTM

SEQ ID NO: 1305 - protein, 369 aa, Homo sapiens
MWSGRKLGSSGGWFLRVLGPVGCNTKAARPLISSAVYVKNQLSGTLQIKPGVFNEYRTIWFKSYRTIFSCLNRIKSFRYPWARLYSTSQTTVDSGEVKTFLALAHKWWDEQGVYAPLHSMNDLRVPFIRDNLLKTIPNHQPGKPLLGMKILDVGCGGGLLTEPLGRLGASVIGIDPVDEDIKTAQCHKSFDPVLDKRIEYRVCSLEEIVEETAETFDAVVASEVVEHVIDLETFLQCCCQVLKPGGSLFITTINKTQLSYALGIVFSEQIASIVPKGTHTWEKFVSPETLESILESNGLSVQTVVGMLYNPFSGYWHWSENTSLNYAAHAVKSRVQEHPASAEFVLKGETEELQANACTNPAVHEKLKK

SEQ ID NO: 1306 - protein, 494 aa, Homo sapiens
MMTTLQNKEECGKGPKRIFAPPAQKSYSLLPCSPNSPKEETPGISSPETEARISLPKASLKKKEEKATMKNVPSREQEKKRKAQINKQAEKKEKEKSSLTNAEFEEIVQIVLQKSLQECLGMGSGLDFAETSCAQPVVSTQSDKEPGITASATDTDNANGEEVPHTQEISVSWEGEAAPEIRTSKLGQPDPAPSKKKSNRLTLSKRKKEAHEKVEKTQGGHEHRQEDRLKKTVQDHSQIRDQQKGEISGFGQCLVWVQCSFPNCGKWRRLCGNIDPSVLPDNWSCDQNTDVQYNRCDIPEETWTGLESDVAYASYIPGSIIWAKQYGYPWWPGMIESDPDLGEYFLFTSHLDSLPSKYHVTFFGETVSRAWIPVNMLKNFQELSLELSVMKKRRNDCSQKLGVALMMAQEAEQISIQERVNLFGFWSRFNGSNSNGERKDLQLSGLNSPGSCLEKKEKEEELEKEEGEKTDPILPIRKRVKIQTQKNQAKRAWG

SEQ ID NO: 1307 - protein, 110 aa, Homo sapiens [sequence omitted]

SEQ ID NO: 1308 - protein, 1196 aa, Homo sapiens
MPTAESEAKVKTKVRFEKLLKTHSDLMREKKKLKKKLVRSEENISPDTIRSNLHYMKETTSDDPDTIRSNLPHIKETTSDDVSAANTNNLKKSTRVTKNKLRNTQLATENPNGDASVEEDKQGKPNKKVIKTVPQLTTQDLKPETPENKVDSTHQKTHTKPQPGVDHQKSEKANEGREETDLEEDEELMQAYQCHVTEEMAKEIKRKIRKKLKEQLTYFPSDTLFHDDKLSSEKRKKKKEVPVFSKAETSTLTISGDTVEGEQKKESSVRSVSSDSHQDDEISSMEQSTEDSMQDDTKPKPKKTKKKTKAVADNNEDVDGDGVHEITSRDSPVYPKCLLDDDLVLGVYIHRTDRLKSDFMISHPMVKIHVVDEHTGQYVKKDDSGRPVSSYYEKENVDYILPIMTQPYDFKQLKSRLPEWEEQIVFNENFPYLLRGSDESPKVILFFEILDFLSVDEIKNNSEVQNQECGFRKIAWAFLKLLGANGNANINSKLRLQLYYPPTKPRSPLSVVEAFEWWSKCPRNHYPSTLYVTVRGLKVPDCIKPSYRSMMALQEEKGKPVHCERHHESSSVDTEPGLEESKEVIKWKRLPGQACRIPNKHLFSLNAGERGCFCLDFSHNGRILAAACASRDGYPIILYEIPSGRFMRELCGHLNIIYDLSWSKDDHYILTSSSDGTARIWKNEINNTNTFRVLPHPSFVYTAKFHPAVRELVVTGCYDSMIRIWKVEMREDSAILVRQFDVHKSFINSLCFDTEGHHMYSGDCTGVIVVWNTYVKINDLEHSVHHWTINKEIKETEFKGIPISYLEIHPNGKRLLIHTKDSTLRIMDLRILVARKFVGAANYREKIHSTLTPCGTFLFAGSEDGIVYVWNPETGEQVAMYSDLPFKSPIRDISYHPFENMVAFCAFGQNEPILLYIYDFHVAQQEAEMFKRYNGTFPLPGIHQSQDALCTCPKLPHQGSFQIDEFVHTESSSTKMQLVKQRLETVTEVIRSCAAKVNKNLSFTSPPAVSSQQSKLKQSNMLTAQEILHQFGFTQTGIISIERKPCNHQVDTAPTVVALYDYTANRSDELTIHRGDIIRVFFKDNEDWWYGSIGKGQEGYFPANHVASETLYQELPPEIKERSPPLSPEEKTKIEKSPAPQKQSINKNKSQDFRLGSESMTHSEMRKEQSHEDQGHIMDTRMRKNKQAGRKVTLIE

SEQ ID NO: 1309 - protein, 1514 aa, Homo sapiens
RTGRLVSLSACGRTARRQQPGQEFNHGLVLSREPLRDGRVFTVRIDRKVNSWSGSIEIGVTALDPSVLDFPSSATGLKGGSWVVSGCSVLRDGRSVLEEYGQDLDQLGEGDRVGVERTVAGELRLWVNGRDCGVAATGLPPRVWAVVDLYGKCTQITVLPPEPGFSPPTPIPTPPLEPLAPSEDSALAEQGTSADEAFMVSPAQARPETFPNSLESHNDFANMELSEVVSNTILSAYNGGLLNVNLSSPPAGEGLGSSGAATSPILTSNDALLFHEKCGTLIKLSNNNKTAERRRPLDEFNNGVVMTNRPLRGNEMFEIRIDKLVDKWSGSIEIGVTTHNPNSLEYPATMTNLQSGTIMMSGCGILTNGKGTRREYCEFSLDELQEGDHIGLTRKSNSALHFFINGIDQGVATPLTPPVVYGVVDLYGMAVKVTIVHNNNHSDRLRRNNAILRALSPEGALRRAAPAAQAEPERLLFHPNCGQKAAITHEGRTALRPHATDDFNHGVVLSSRALRDGEVFQVRIDKMVDKWAGSIEIGVTTHNPAYLQLPSTMTNLRSGTWMMTGNGVMHNGTTILDEYGHNLDRLKAGDAVGVVRREDGTLHFFVNGMTQGPAAWNVPPGVYAVVDLYGQAAQATIVDDVEVAPVPEPLPEGNNQVSPSSPSSGAGGSDLRFHQLHGSNAVITNGGRTALRHNCRSEFNDAIVISNRALRDGELFEIVIQKMVDRWSGSIEAGVTAIRPEDLEFPNTMTDIDYDTWMLSGTAIMQDGNTMRNNYGCDLDALGTGARIGMMRTAKGDLHYFINGQDQGAACSGLPPEVYAVVDLYGQCVQVSITNATGPMDNSLATSNTATEKSFPLHSPVAGVAHRFHSTCGKNVTLEEDGTRAVRAAGYAHGLVFSTKELRAEEVFEVKVEELDEKWAGSLRLGLTTLAPGEMGPGAGGGGPGLPPSLPELRTKTTWMVSSCEVRRDGQLQRMNYGRNLERLGVGSRVGVRRGADDTMHILVDGEDMGPAATGIAKNVWAVLDLYGPVRGVSIVSSTRLEESEGTQPPSPSSDTGSEGEEDDEGEEHGLGGQNEVGIIPTTLEFLENHGKNILLSNGNRTATRVASYNQGIVVINQPLVPQLLVQVRIDFLNRQWTSSLVLGVITCAPERLNFPASACALKRAAWLLRGRGVFHNGLKICEKFGPNLDTCPEGTILGLRLDSSGGLHLHVNGVDQGVAVPDVPQPCHALVDLYGQCEQVTIVNPEPGAASGKSAGTQGDMEKADMVDGIKESVCWGPPPAASPLKSCEYHALCSRFQELLLLPEDYFMPPPKRSLCYCESCRKLRGDEAHRRRGEPPREYALPFGWCRFNLRVNPRLEAGTLTKKWHMAYHGSNVAAVRRVLDRGELGAGTASILSCRPLKGEPGVGFEEPGENCAPPREEQPPPVLLSPSLQYAGAETLASKVQFRDPKSQRTHQAQVAFQVCVRPGSYTPGPPSAALGEPPDPHFSPAELEWVTKEKGATLLCALLVRVE

SEQ ID NO: 1310 - protein, 1086 aa, Homo sapiens
MIAVSTANGYILFFHITSTRGDKYLYEPVYPKGSPQMKGTPHFKEEQCAPALNLEMRKILDLQAPIMSLQSVLEDLLVATSDGLLHLIHWEGMTNGRKAINLCTVPFSVDLQSSRVGSFLGFTDVHIRDMEYCATLDGFAVVFNDGKVGFITPVSSRFTAEQLHGVWPQDVVDGTCVAVNNKYRLMAFGCVSGSVQVYTIDNSTGAMLLSHKLELTAKQYPDIWNKTGAVKLMRWSPDNSVVIVTWEYGGLSLWSVFGAQLICTLGGDFAYRSDGTKKDPLKINSMSWGAEGYHLWVISGFGSQNTEIESDLRSVVKQPSILLFQFIKSVLTVNPCMSNQEQVLLQGEDRLYLNCGEASQTQNPRSSSTHSEHKPSREKSPFADGGLESQGLSTLLGHRHWHVVQISSTYLESNWPIRFSAIDKLGQNIAVVGKFGFAHYSLLTKKWKLFGNITQEQNMIVTGGLAWWNDFMVLACYNINDRQEELRVYLRTSNLDNAFAHVTKAQAETLLLSVFQDMVIVFRADCSICLYSIERKSDGPNTTAGIQVLQEVSMSRYIPHPFLVVSVTLTSVSTENGITLKMPQQARGAESIMLNLAGQLIMMQRDRSGPQIREKDSNPNNQRKLLPFCPPVVLAQSVENVWTTCRANKQKRHLLEALWLSCGGAGMKVWLPLFPRDHRKPHSFLSQRIMLPFHINIYPLAVLFEDALVLGAVNDTLLYDSLYTRNNAREQLEVLFPFCVVERTSQIYLHHILRQLLVRNLGEQALLLAQSCATLPYFPHVLELMLHEVLEEEATSREPIPDPLLPTVAKFITEFPLFLQTVVHCARKTEYALWNYLFAAVGNPKDLFEECLMAQDLDTAASYLIILQNMEVPAVSRQHATLLFNTALEQGKWDLCRHMIRFLKAIGSGESETPPSTPTAQEPSSSGGFEFFRNRSISLSQSAENVPASKFSLQKTLSMPSGPSGKRWSKDSDCAENMYIDMMLWRHARRLLEDVRLKDLGCFAAQLGFELISWLCKERTRAARVDNFVIALKRLHKDFLWPLPIIPASSISSPFKNGKYRTGNVDFMSLVQGELYFTPCIYTFCY

SEQ ID NO: 1311 - protein, 1188 aa, Homo sapiens
MEKATVPVAAATAAEGEGSPPAVAAVAGPPAAAEVGGGVGGSSRARSASSPRGMVRVCDLLLKKKPPQQQHHKAKRNRTCRPPSSSESSSDSDNSGGGGGGGGGGGGGGGTSSNNSEEEEDDDDEEEEVSEVESFILDQDDLENPMLETASKLLLSGTADGADLRTVDPETQARLEALLEAAGIGKLSTADGKAFADPEVLRRLTSSVSCALDEAAAALTRMRAESTANAGQSDNRSLAEACSEGDVNAVRKLLIEGRSVNEHTEEGESLLCLACSAGYYELAQVLLAMHANVEDRGIKGDITPLMAAANGGHVKIVKLLLAHKADVNAQSSTGNTALTYACAGGYVDVVKVLLESGASIEDHNENGHTPLMEAGSAGHVEVARLLLENGAGINTHSNEFKESALTLACYKGHLEMVRFLLEAGADQEHKTDEMHTALMEACMDGHVEVARLLLDSGAQVNMPADSFESPLTLAACGGHVELAALLIERGASLEEVNDEGYTPLMEAAREGHEEMVALLLGQGANINAQTEETQETALTLACCGGFLEVADFLIKAGADIELGCSTPLMEAAQEGHLELVKYLLAAGANVHATTATGDTALTYACENGHTDVADVLLQAGADLEHESEGGRTPLMKAARAGHVCTVQFLISKGAECESEPQLIMTILSALACAGGHLAVVELLLAHGADPTHRLKDGSTMLIEAPKGGHTSVGCYLLDYPNNLLSAPPPDVTQLTPPSHDLNRAPRVPVQALPMVVPPQEPDKPPANVATTLPIRNKAASKQKSSSHLPANSQDVQGYITNQSPESIVEEAQGKLTELEQRIKEAIEKNAQLQSLELAHADQLTKEKIEELNKTREEQIQKKQKILEELQKVERELQLKTQQQLKKQYLEVKAQRIQLQQQQQQSCQHLGLLTPVGVGEQLSEGDYARLQQVDPVLLKDEPQQTAAQMGFAPIQPLAMPQALPLAAGPLPPGSIANLTELQGVIVGQPVLGQAQLAGLGQGILTETQQGLMVASPAQTLNDTLDDIMAAVSGRASAMSNTPTHSIAASISQPQTPTPSPIISPSAMLPIYPAIDIDAQTESNHDTALTLACAGGHEELVQTLLERGASIEHRDKKGFTPLILAATSWSCWCCGNIAGQWCSTLKPSLKEPRTHHSPWLVLGEDRRWLELLLGSRGQLQEHRKVLITHL

SEQ ID NO: 1312 - protein, 43 aa, Homo sapiens
AHGPGVEPTSRHQKNNLSSSHTVRLETRGQTENQECLLCPHEE

SEQ ID NO: 1313 - protein, 1917 aa, Homo sapiens
LELIEKLLQNRITIVDRFLNSSNDHRFQALQDNCKKILGENAKPNYGCQVTIQSEQEKQLMKQYRREEKRIARREKKAGEDLEVSEGLMCFDPKELRIQREQALLNARSVPILSRQRDADVEKIHYPHVYDSQAEAMKTSAFIAGAKMILPEGIQRENNKLYEEVRIPYSEPMPLSFEEKPVYIQDLDEIGQLAFKGMKRLNRIQSIVFETAYNTNENMLICAPTGAGKTNIAMLTVLHEIRQHFQQGVIKKNEFKIVYVAPMKALAAEMTDYFSRRLEPLGIIVKELTGDMQLSKSEILRTQMLVTTPEKWDVVTRKSVGDVALSQIVRLLILDEVHLLHEDRGPVLESIVARTLRQVESTQSMIRILGLSATLPNYLDVATFLHVNPYIGLFFFDGRFRPVPLGQTFLGIKCANKMQQLNNMDEVCYENVLKQVKAGHQVMVFVHARNATVRTAMSLIERAKNCGHIPFFFPTQGHDYVLAEKQVQRSRNKQVRELFPDGFSIHHAGMLRQDRNLVENLFSNGHIKVLVCTATLAWGVNLPAHAVIIKGTQIYAAKRGSFVDLGILDVMQIFGRAGRPQFDKFGEGIIITTHDKLSHYLTLLTQRNPIESQFLESLADNLNAEIALGTVTNVEEAVKWISYTYLYVRMRANPLAYGISHKAYQIDPTLRKHREQLVIEVGRKLDKAQMIRFEERTGYFSSTDLGRTASHYYIKYNTIETFNELFDAHKTEGDIFAIVSKAEEFDQIKVREEEIEELDTLLSNFCELSTPGGVENSYGKINILLQTYISRGEMDSFSLISDSAYVAQNAARIVRALFEIALRKRWPTMTYRLLNLSKVIDKRLWGWASPLRQFSILPPHILTRLEEKKLTVDKLKDMRKDEIGHILHHVNIGLKVKQCVHQIPSVMMEASIQPITRTVLRVTLSIYADFTWNDQVHGTVGEPWWIWVEDPTNDHIYHSEYFLALKKQVISKEAQLLVFTIPIFEPLPSQYYIRAVSDRWLGAEAVCIINFQHLILPERHPPHTELLDLQPLPITALGCKAYEALYNFSHFNPVQTQIFHTLYHTDCNVLLGAPTGSGKTVAAELAIFRVFNKYPTSKAVYIAPLKALVRERMDDWKVRIEEKLGKKVIELTGDVTPDMKSIAKADLIVTTPEKWDGVSRSWQNRNYVQQVTILIIDEIHLLGEERGPVLEVIVSRTNFISSHTEKPVRIVGLSTALANARDLADWLNIKQMGLFNFRPSVRPVPLEVHIQGFPGQHYCPRMASMNKPAFQAIRSHSPAKPVLIFVSSRRQTRLTALELIAFLATEEDPKQWLNMDEREMENIIATVRDSNLKLTLAFGIGMHHAGLHERDRKTVEELFVNCKVQVLIATSTLAWGVNFPAHLVIIKGTEYYDGKTRRYVDFPITDVLQMMGRAGRPQFDDQGKAVILVHDIKKDFYKKFLYEPFPVESSLLGVLSDHLNAEIAGGTITSKQDALDYITWTYFFRRLIMNPSYYNLGDVSHDSVNKFLSHLIEKSLIELELSYCIEIGEDNRSIEPLTYGRIASYYYLKHQTVKMFKDRLKPECSTEELLSILSDAEEYTDLPVRHNEDHMNSELAKCLPIESNPHSFDSPHTKAHLLLQAHLSRAMLPCPDYDTDTKTVLDQALRVCQAMLDVAANQGWLVTVLNITNLIQMVIQGRWLKDSSLLTLPNIENHHLHLFKKWKPIMKGPHARGRTSIECLPELIHACGGKDHVFSSMVESELHAAKTKQAWNFLSHLPVINVGISVKGSWDDLVEGHNELSVSTLTADKRDDNKWIKLHADQEYVLQVSLQRVHFGFHKGKPESCAVTPRFPKSKDEGWFLILGEVDKRELIALKRVGYIRNHHVASLSFYTPEIPGRYIYTLYFMSDCYLGLDQQYDNLSQRYTSESFCTGQHQGL

SEQ ID NO: 1314 - protein, 930 aa, Homo sapiens [sequence omitted]

SEQ ID NO: 1315 - protein, 163 aa, Homo sapiens [sequence omitted]

SEQ ID NO: 1316 - protein, 505 aa, Homo sapiens [sequence omitted]

SEQ ID NO: 1317 - protein, 146 aa, Homo sapiens
MATAEASGSDGKGQEVETSVTYYRLEEVAKRNSLKELWLVIHGRVYDVTRFLNEHPGGEEVLLEQAGVDASESFEDVGHSSDAREMLKQYYIGDIHPSDLKPESGSKDPSQNDTCKSCWAYWILPIIGAVLLGFLYRYYTSESKSS

SEQ ID NO: 1318 - protein, 553 aa, Homo sapiens [sequence omitted]

SEQ ID NO: 1319 - protein, 997 aa, Homo sapiens
MDDQPGEKELVKRSQLDGEGDGPLSNQLSASSTINPVPLVGLQKPEMSLPVKPGQGDSEASSPFTPVADEDSVVFSKLTYLGCASVNAPRSEVEALRMMSILRSQCQISLDVTLSVPNVSEGIVRLLDPQTNTEIANYPIYKILFCVRGHDGTPESDCFAFTESHYNAELFRIHVFRCEIQEAVSRILYSFATAFRRSAKQTPLSATAAPQTPDSDIFTFSVSLEIKEDDGKGYFSAVPKDKDRQCFKLRQGIDKKIVIYVQQTTNKELAIERCFGLLLSPGKDVRNSDMHLLDLESMGKSSDGKSYVITGSWNPKSPHFQVVNEETPKDKVLFMTTAVDLVITEVQEPVRFLLETKVRVCSPNERLFWPFSKRSTTENFFLKLKQIKQRERKNNTDTLYEVVCLESESERERRKTTASPSVRLPQSGSQSSVIPSPPEDDEEEDNDEPLLSGSGDVSKECAEKILETWGELLSKWHLNLNVRPKQLSSLVRNGVPEALRGEVWQLLAGCHNNDHLVEKYRILITKESPQDSAITRDINRTFPAHDYFKDTGGDGQDSLYKICKAYSVYDEEIGYCQGQSFLAAVLLLHMPEEQAFSVLVKIMFDYGLRELFKQNFEDLHCKFYQLERLMQEYIPDLYNHFLDISLEAHMYASQWFLTLFTAKFPLYMVFHIIDLLLCEGISVIFNVALGLLKTSKDDLLLTDFEGALKFFRVQLPKRYRSEENAKKLMELACNMKISQKKLKKYEKEYHTMREQQAQQEDPIERFERENRRLQEANMRLEQENDDLAHELVTSKIALRKDLDNAEEKADALNKELLMTKQKLIDAEEEKRRLEEESAQLKEMCRRELDKAESEIKKNSSIIGDYKQICSQLSERLEKQQTANKVEIEKIRQKVDDCERCREFFNKEGRVKGISSTKEVLDEDTDEEKETLKNQLREMELELAQTKLQLVEAECKIQDLEHHLGLALNEVQAAKKTWFNRTLSSIKTATGVQGKETC

SEQ ID NO: 1320 - protein, 236 aa, Homo sapiens
MILIGRMSAQVPMNMTITGCMMTFYRTTPAVLFWQWINQSFNAVVNYTNRSGDAPLTVNELGTAYVSATTGAVATALGLNALTKHVSPLIGRFVPFAAVAAANCINIPLMRQRELKVGIPVTDENGNRLGESANAAKQAITQVVVSRILMAAPGMAIPPFIMNTLEKKAFLKRFPWMSAPIQVGLVGFCLVFATPLCCALFPQKSSMSVTSLEAELQAKIQESHPELRRVYFNKGL

SEQ ID NO: 1321 - protein, 570 aa, Homo sapiens
MGHFTKPQQLQEEMKELQQSTEKAVAARDKLMDRHQDISKAFTKTDQSKTNYISICKMHEVLEECGCSLTEGELTHLLNSWGVSRHDNAINYLDFLRAVENSKSTGAQPKEKEESMPINFATLNPQEVVRKIQEVVESSQLALSTAFSALDKEDTGFVKATEFGQVLKDFCYKLTDNQYHYFLRKLRIHLTPYINWKYFLQNFSCFLEETADEWAEKMPKGPPPTSPKATADRDILARLHKAVTSHYHAITQEFENFDTMKTNTISREEFRAICNRRVQILTDEQFDRLWNEMPVNAKGRLKYPDFLSRFSSETAATPMATGDSAVAQRGSSVPDVSEGTRSALSLPTQELRPGSKSQSHPCTPASTTVIPGTPPLQNCDPIESRLRKRIQGCWRQLLKECKEKDVARQGDINASDFLALVEKFNLDISKEECQQLIIKYDLKSNGKFAYCDFIQSCVLLLKAKESSLMHRMKIQNAHKMKEAGAETPSFYSALLRIQPKIVHCWRPMRRTFKSYDEAGTGLLSVADFRTVLRQYSINLSEEEFFHILEYYDKTLSSKISYNDFLRAFLQ

SEQ ID NO: 1322 - protein, 191 aa, Homo sapiens
MKRMAENELSRSVNEFLSKLQDDLKEAMNTMMCSRCQGKHRRFEMDREPKSARYCAECNRLHPAEEGDFWAESSMLGLKITYFALMDGKVYDITEWAGCQRVGISPDTHRVPYHISFGSRIPGTRGRQRATPDAPPADLQDFLSRIFQVPPGQMPMGTSLQLLSLPLEPLQPLSPTAQYPREKPNLSGGRK

SEQ ID NO: 1323 - protein, 131 aa, Homo sapiens
MEAQAQGLLETEPLQGTDEDAVASADFSSMLSEEEKEELKAELVQLEDEITTLRQVLSAKERHLVEIKQKLGMNLMNELKQNFSKSWHDMQTTTAYKKTHETLSHAGQKATAAFSNVGTAISKKFGDMRRK

SEQ ID NO: 1324 - protein, 737 aa, Homo sapiens [sequence omitted]

SEQ ID NO: 1325 - protein, 1042 aa, Homo sapiens
IQSRLRKKRREEGPAETVGSEASDTVEGVLPSKQEPENDQGVVSQAGKDDRESKLEGKAAQDIKDEEPGDLGRPKPECEGYDPNALYCICRQPHNNRFMICCDRCEEWFHGDCVGISEARGRLLERNGEDYICPNCTILQVQDETHSETADQQEAKWRPGDADGTDCTSIGTIEQKSSEDQGIKGRIEKAANPSGKKKLKIFQPGPGPVPTQLPVLWQVLEIAVSRSISAFTLLHCISCKVIEAPGASKCIGPGCCHVAQPDSVYCSNDCILKHAAATMKFLSSGKEQKPKPKEKMKMKPEKPSLPKCGAQAGIKISSVHKRPAPEKKETTVKKAVVVPARSEALGKEAACESSTPSWASDHNYNAVKPEKTAAPSPSLLYKSTKEDRRSEEKAAAMAASKKTAPPGSAVGKQPAPRNLVPKKSSFANVAAATPAIKKPPSGFKGTIPKRPWLSATPSSGASAARQAGPAPAAATAASKKFPGSAALVGAVRKPVVPSVPMASPAPGRLGAMSAAPSQPNSQIRQNIRRSLKEILWKRVNDSDDLIMTENEVGKIALHIEKEMFNLFQVTDNRYKSKYRSIMFNLKDPKNQGLFHRVLREEISLAKLVRLKPEELVSKELSTWKERPARSVMESRTKLHNESKKTAPRQEAIPDLEDSPPVSDSEEQQESARAVPEKSTAPLLDVFSSMLKDTTSQHRAHLFDLNCKICTGQVPSAEDEPAPKKQKLSASVKKEDLKSKHDSSAPDPAPDSADEVMPEAVPEVASEPGLESASHPNVDRTYFPGPPGDGHPEPSPLEDLSPCPASCGSGVVTTVTVSGRDPRTAPSSSCTAVASAASRPDSTHMVEARQDVPKPVLTSVMVPKSILAKPSSSPDPRYLSVPPSPNISTSESRSPPEGDTTLFLSRLSTIWKGFINMQSVAKFVTKAYPVSGCFDYLSEDLPDTIHIGGRIAPKTVWDYVGKLKSSVSKELCLIRFHPATEEEEVAYISLYSYFSSRGRFGVVANNNRHVKDLYLIPLSAQDPVPSKLLPFEGPGKRRLSGWR

SEQ ID NO: 1326 - protein, 1957 aa, Homo sapiens
VGLDDIMDEGVVKESGNDTIDEEELILPNRNLRDKVEENSVRSPRKSPRLMAQEQVRSLRQSTIAKRSNAAPLSNTKKASGKTVSTAKAGVKQPERSQVKEEVCMSLKPEYHKENRRCSRNSGQIEVVPEVSVSSSHSSVSSCLEMKDEDGLDSKHKCNNPGEIDVPSHELNCSLLSETCVTIGEKKNEALMECKAKPVGSPLFKFSDKEEHEQNDSISGKTGETVVEEMIATRKVEQDSKETVKLSHEDDHILEDAGSSDISSDAACTNPNKTENSLVGLPSCVDEVTECNLELKDTMGIADKTENTLERNKIEPLGYCEDAESNRQLESTEFNKSNLEVVDTSTFGPESNILENAICDVPDQNSKQLNAIESTKIESHETANLQDDRNSQSSSVSYLESKSVKSKHTKPVIHSKQNMTTDAPKKIVAAKYEVIHSKTKVNVKSVKRNTDVPESQQNFHRPVKVRKKQIDKEPKIQSCNSGVKSVKNQAHSVLKKTLQDQTLVQIFKPLTHSLSDKSHAHPGCLKEPHHPAQTGHVSHSSQKQCHKPQQQAPAMKTNSHVKEELEHPGVEHFKEEDKLKLKKPEKNLQPRQRRSSKSFSLDEPPLFIPDNIATIRREGSDHSSSFESKYMWTPSKQCGFCKKPHGNRFMVGCGRCDDWFHGDCVGLSLSQAQQMGEEDKEYVCVKCCAEEDKKTEILDPDTLENQATVEFHSGDKTMECEKLGLSKHTTNDRTKYIDDTVKHKVKILKRESGEGRNSSDCRDNEIKKWQLAPLRKMGQPVLPRRSSEEKSEKIPKESTTVTCTGEKASKPGTHEKQEMKKKKVEKGVLNVHPAASASKPSADQIRQSVRHSLKDILMKRLTDSNLKVPEEKAAKVATKIEKELFSFFRDTDAKYKNKYRSLMFNLKDPKNNILFKKVLKGEVTPDHLIRMSPEELASKELAAWRRRENRHTIEMIEKEQREVERRPITKITHKGEIEIESDAPMKEQEAAMEIQEPAANKSLEKPEGSEKQKEEVDSMSKDTTSQHRQHLFDLNCKICIGRMAPPVDDLSPKKVKVVVGVARKHSDNEAESIADALSSTSNILASEFFEEEKQESPKSTFSPAPRPEMPGTVEVESTFLARLNFIWKGFINMPSVAKFVTKAYPVSGSPEYLTEDLPDSIQVGGRISPQTVWDYVEKIKASGTKEICVVRFTPVTEEDQISYTLLFAYFSSRKRYGVAANNMKQVKDMYLIPLGATDKIPHPLVPFDGPGLELHRPNLLLGLIIRQKLKRQHSACASTSHIAETPESAPPIALPPDKKSKIEVSTEEAPEEENDFFNSFTTVLHKQRNKPQQNLQEDLPTAVEPLMEVTKQEPPKPLRFLPGVLIGWENQPTTLELANKPLPVDDILQSLLGTTGQVYDQAQSVMEQNTVKEIPFLNEQTNSKIEKTDNVEVTDGENKEIKVKVDNISESTDKSAEIETSVVGSSSISAGSLTSLSLRGKPPDVSTEAFLTNLSIQSKQEETVESKEKTLKRQLQEDQENNLQDNQTSNSSPCRSNVGKGNIDGNVSCSENLVANTARSPQFINLKRDPRQAAGRSQPVTTSESKDGDSCRNGEKHMLPGLSHNKEHLTEQINVEEKLCSAEKNSCVQQSDNLKVAQNSPSVENIQTSQAEQAKPLQEDILMQNIETVHPFRRGSAVATSHFEVGNTCPSEFPSKSITFTSRSTSPRTSTNFSPMRPQQPNLQHLKSSPPGFPFPGPPNFPPQSMFGFPPHLPPPLLPPPGFGFAQNPMVPWPPVVHLPGQPQRMMGPLSQASRYIGPQNFYQVKDIRRPERRHSDPWGRQDQQQLDRPFNRGKGDRQRFYSDSHHLKRERHEKEWEQESERHRRRDRSQDKDRDRKSREEGHKDKERARLSHGDRGTDGKASRDSRNVDKKPDKPKSEDYEKDKEREKSKHREGEKDRDRYHKDRDHTDRTKSKR

SEQ ID NO: 1327 - protein, 178 aa, Homo sapiens
MAFAGLTADARIVINRARVECQSHRLTVEDPVTVEYITRYIASLKQRYTQSNGRRPFGISALIVGFDFDGTPRLYQTDPSGTYHAWKANAIGRGAKSVREFLEKNYTDEAIETDDLTIKLVIKALLEVVQSGGKNIELAVMRRDQSLKILNPEEIEKYVAEIEKEKEENEKKKQKKAS

SEQ ID NO: 1328 - protein, 1454 aa, Homo sapiens
IEDGGKAALSQKMRTGDELVNINGTPLYGSRQEALILIKGSFRILKLIVRRRNAPVSRPHSWHVAKLLEGCPEAATTMHFPSEAFSLSWHSGCNTSDVCVQWCPLSRHCSTEKSSSIGSMESLEQPGQATYESHLLPIDQNMYPNQRDSAYSSFSASSNASDCALSLRPEEPASTDCIMQGPGPTKAPSGRPNVAETSGGSRRTNGGHLTPSSQMSSRPQEGYQSGPAKAVRGPPQPPVRRDSLQASRAQLLNGEQRRASEPVVPLPQKEKLSLEPVLPARNPNRFCCLSGHDQVTSEGHQNCEFSQPPESSQQGSEHLLMQASTKAVGSPKACDRASSVDSNPLNEASAELAKASFGRPPHLIGPTGHRHSAPEQLLASHLQHVHLDTRGSKGMELPPVQDGHQWTLSPLHSSHKGKKSPCPPTGGTHDQSSKERKTRQVDDRSLVLGHQSQSSPPHGEADGHPSEKGFLDPNRTSRAASELANQQPSASGSLVQQATDCSSTTKAASGTEAGEEGDSEPKECSRMGGRRSGGTRGRSIQNRRKSERFATNLRNEIQRRKAQLQKSKGPLSQLCDTKEPVEETQEPPESPPLTASNTSLLSSCKKPPSPRDKLFNKSMMLRARSSECLSQAPESHESRTGLEGRISPGQRPGQSSLGLNTWWKAPDPSSSDPEKAHAHCGVRGGHWRWSPEHNSQPLVAAAMEGPSNPGDNKELKASTAQAGEDAILLPFADRRKFFEESSKSLSTSHLPGLTTHSNKTFTQRPKPIDQNFQPMSSSCRELRRHPMDQSYHSADQPYHATDQSYHSMSPLQSETPTYSECFASKGLENSMCCKPLHCGDFDYHRTCSYSCSVQGALVHDPCIYCSGEICPALLKRNMMPNCYNCRCHHHQCIRCSVCYHNPQHSALEDSSLAPGNTWKPRKLTVQEFPGDKWNPITGNRKTSQSGREMAHSKTSFSWATPFHPCLENPALDLSSYRAISSLDLLGDFKHALKKSEETSVYEEGSSLASMPHPLRSRAFSESHISLAPQSTRAWGQHRRELFSKGDETQSDLLGARKKAFPPPRPPPPNWEKYRLFRAAQQQKQQQQQQKQQEEEEEEEEEEEEEEEEEEEEAEEEEEELPPQYFSSETSGSCALNPEEVLEQPQPLSFGHLEGSRQGSQSVPAEQESFALHSSDFLPPIRGHLGSQPEQAQPPCYYGIGGLWRTSGQEATESAKQEFQHFSPPSGAPGIPTSYSAYYNISVAKAELLNKLKDQPEMAEIGLGEEEVDHELAQKKIQLIESISRKLSVLREAQRGLLEDINANSALGEEVEANLKAVCKSNEFEKYHLFVGDLDKVVNLLLSLSGRLARVENALNSIDSEANQEKLVLIEKKQQLTGQLADAKELKEHVDRREKLVFGMVSRYLPQDQLQDYQHFVKMKSALIIEQRELEEKIKLGEEQLKCLRESLLLGPSNF

SEQ ID NO: 1329 - protein, 120 aa, Homo sapiens
MERQLIMQSEMRERQMAMQIAWSREFLKYFGTFFGLAAISLTAGAIKKKKPAFLVPIVPLSFILTYQYDLGYGTLLERMKGEAEDILETEKSKLQLPRGMITFESIEKARKEQSRFFIDK

SEQ ID NO: 1330 - protein, 371 aa, Homo sapiens
EENEDRLIDRITLYQHLKSSLNEYQPKLYQVLDDGKRLLISISCSDLESQLNQLGECWLSNTNKMSKELHRLETILKHWTRYQSESADLIHWLQSAKDRLEFWTQQSVTVPQELDTGNQLLRLKKVDTATLRSELSRIDSQWTDLLTNIPAVQEKLHQLQMDKLPSRHAISEVMSWISLMENVIQKDEDNIKNSIGYKAIHEYLQKYKGFKIDINCKQLTVDFVNQSVLQISSQDVESKRSDKTDFAEQLGAMNKSWQILQGLVTEKIQLLEGLLESWSEYENNVQCLKTWFETQEKRLKQQHRIGDQASVQNALKDCQDLEDLIKAKEKEVEKIEQNGLALIQNKKEDVSSIVMSTLRELGQTWANLDHM

SEQ ID NO: 1331 - protein, 1117 aa, Homo sapiens
MRKLLSFGRRLGQALLSSMDQEYAGRGYHIRDWELRKIHRAAIKGDAAEVEHCLTRRFRDLDVRDRKDRTVLHLACAHGRVQVVTLLLDRKCQINICDRLNRTPLMKAVHCQEEACAIILLKRGANPNIKDIYGNTALHYAVYNEGTSLAERLLSHHANIEALNKEGNTPLLFAINSRRQHMVEFLLKNQANIHAVDNFKRTALILAVQHNLSSIVTLLLQQNIHISSQDMFGQTAEDYAFCCDLRSIQQQILEHKNKMLKNHLRNDNQEAAAMKNESFKTQGASSKVSLYHQSGVQWHDLRLLQPSPPRFKQFSCLSLPRSWDNRHMRPCPETAAMKPENLKKRKKRKKLKKRKEGAKEHNLKVASEEKQERLERSENKQPQDSQSYGKKKDEMFGNFMLKRDIAMLKEELYAIKNDSLRKEKKYIQEIKSITEINANFEKSVRLNEEMITKKVAQYSQQLNDLKAENARLNSKLEKEKHNKERLEAEVESLHSNLATAINEYNEILERKDLELVLWRADDVSRHETMGSNISQLTDKNELLTEQVHKARVKFNTLKGKLRETRDALREKTLALESVQLDLKQAQHRIKEMKQMHPNGEAKESQSIGKQNSSEERIRQRELENLLLERQLEDARKEGDNKEIVINIHRDCLENGKEDLLEERNKELMNEYNYLKEKLLQYEKEKAEREVIVREFQEELVDHLKKFSMSESPLEGTSHCHINLDETWTSKKKLFQVEIQPEEKHEEFRKVFELISLLNYTADQIRKKNRELEEEATGYKKCLEMTINMLNAFANEDFSCHGDLNTDQLKMDILFKKLKQKFDDLMAEKEAVSSKCVNLAKDNEVLHQELLSMGKVQEKCEKLEKDKKMLEEKVLNLKTHMEKDMVELGKVQEYKSELDERAMQAIEKLEEIHLQKQAEYEKQLEQLNKDNTASLKKKELTLKDVECKFSKMKTAYEDVTTELEEYKEAFAVALKANSSMSEKITKSDKKIAVISTKLFMEKERMEYFLSTLPMRPDPELPCVENLNSIELNRKYIPKMAIRIPTSNPQTSNNCKNSLTEMELDCAEQIITETKKIINLCIPSTRKPMILTQNFCCVGPLLLSTFFSRIHCPRMSNFS

SEQ ID NO: 1332 - protein, 903 aa, Homo sapiens
MAPTKPSFQQDPSRRERLQALRKEKSRDAARSRRGKENFEFYELAKLLPLPAAITSQLDKASIIRLTISYLKMRDFANQGDPPWNLRMEGPPPNTSVKVIGAQRRRSPSALAIEVFEAHLGSHILQSLDGFVFALNQEGKFLYISETVSIYLGLSQVELTGSSVFDYVHPGDHVEMAEQLGMKLPPGRGLLSQGTAEDGASSASSSSQSETPEPVESTSPSLLTTDNTLERSFFIRMKSTLTKRGVHIKSSGYKVIHITGRLRLRVSLSHGRTVPSQIMGLVVVAHALPPPTINEVRIDCHMFVTRVNMDLNIIYCENRISDYMDLTPVDIVGKRCYHFIHAEDVEGIRHSHLDLLNKGQCVTKYYRWMQKNGGYIWIQSSATIAINAKNANEKNIIWVNYLLSNPEYKDTPMDIAQLPHLPEKTSESSETSDSESDSKDTSGITEDNENSKSDEKGNQSENSEDPEPDRKKSGNACDNDMNCNDDGHSSSNPDSRDSDDSFEHSDFENPKAGEDGFGALGAMQIKVERYVESESDLRLQNCESLTSDSAKDSDSAGEAGAQASSKHQKRKKRRKRQKGGSASRRRLSSASSPGGLDAGLVEPPRLLSSPNSASVLKIKTEISEPINFDNDSSIWNYPPNREISRNESPYSMTKPPSSEHFPSPQGGGGGGGGGGGLHVAIPDSVLTPPGADGAAARKTQFGASATAALAPVASDPLSPPLSASPRDKHPGNGGGGGGGGGGAGGGGPSASNSLLYTGDLEALQRLQAGNVVLPLVHRVTGTLAATSTAAQRVYTTGTIRYAPAEVTLAMQSNLLPNAHAVNFVDVNSPGFGLDPKTPMEMLYHHVHRLNMSGPFGGAVSAASLTQMPAGNVFTTAEGLFSTLPFPVYSNGIHAAQTLERKED

SEQ ID NO: 1333 - protein, 1147 aa, Homo sapiens [sequence omitted]

SEQ ID NO: 1334 - protein, 842 aa, Homo sapiens
MDFQERDPPFLPESAQSSKPSSAQQASELWEVVEEPRVRLGTEGVMPERQEGHLLKKRKWPLKGWHKRYFVLEDGILHYATTRQDITKGKLHGSIDVRLSVMSINKKAQRIDLDTEDNIYHLKIKSQDLFQSWVAQLRAHRLAHRLDMPRGSLPSTAHRKVPGAQLPTAATASALPGLGPREKVSSWLRDSDGLDRCSHELSECQGKLQELHRLLQSLESLHRIPSAPVIPTHQASVTTERPKKGKRTSRMWCTQSFAKDDTIGRVGRLHGSVPNLSRYLESRDSSGTRGLPPTDYAHLQRSFWALAQKVHSSLSSVLAALTMERDQLRDMHQGSELSRMGVSEASTGQRRLHSLSTSSDTTADSFSSLNPEEQEALYMKGRELTPQLSQTSILSLADSHTEFFDACEVLLSASSSENEGSEEEESCTSEITTSLSEEMLDLRGAERCQKGGCVPGRPMGPPRRRCLPAASGPGADVSLWNILRNNIGKDLSKVSMPVQLNEPLNTLQRLCEELEYSSLLDQASRIADPCERMVYIAAFAVSAYSSTYHRAGCKPFNPVLGETYECERPDRGFRFISEQVSHHPPISACHAESENFAFWQDMKWKNKFWGKSLEIVPVGTVNVSLPRFGDHFEWNKVTSCIHNVLSGQRWIEHYGEVLIRNTQDSSCHCKITFCKAKYWSSNVHEVQGAVLSRSGRVLHRLFGKWHEGLYRGPTPGGQCIWKPNSMPPDHERNFGFTQFALELNELTAELKRSLPSTDTRLRPDQRYLEEGNIQAAEAQKRRIEQLQRDRRKVMEENNIVHQARFFRRQTDSSGKEWWVTNNTYWRLRAEPGYGNMDGAVLW

SEQ ID NO: 1335 - protein, 852 aa, Homo sapiens
MLPGTSTGNNQSTITLSVASQNLTFTSSSSPPNGDSINKDPKLCTKSPRKRLSSTLQETQVPPVKKPIVEQLSAATIEGQKQGSVKKDQKVPHSGKTEGSTAGAQIPSKVSVNVSSHIGANQPLNSSALVISDSALEQQTTPSSSPDIKVKLEGSVFLLDSDSKSVGSFNPNGWQQITKDSEFISASCEQQQDISVMTIPEHSDINDLEKSVWELEGMPQDTYSQQLHSQIQESSLNQIQAHSSDQLPLQSELKEFEPSVSQTNESYFPFDDELTQDSIVEELVLMEQQMSMNNSHSYGNCLGMTLQSQSVTPGAPMSSHTSSTHFYHPIHSNGTPIHTPTPTPTPTPTPTPTPTPTSEMIAGSQSLSRESPCSRLAQTTPVDSALGSSRHTPIGTPHSNCSSSVPPSPVECRNPFAFTPISSSMAYHDASIVSSSPVKPMQRPMATHPDKTKLEWMNNGYSGVGNSSVSGHGILPSYQELVEDRFRKPHAFAVPGQSYQSQSRHHDTHFGRLTPVSPVQHQGATVNNTNKQEGFAVPAPLDNKGTNSSASSNFRCRSVSPAVHRQRNLSGSTLYPVSNIPRSNVTPFGSPVTPEVHVFTNVHTDACANNIAQRSQSVPLTVMMQTAFPNALQKQANSKKITNVLLSKLDSDNDDAVRGLGMNNLPSNYTARMNLTQILEPSTVFPSANPQNMIDSSTSVYEFQTPSYLTKSNSTGQINFSPGDNQAQSEIGEQQLDFNSTVKDLLSGDSLQTNQQLVGQGASDLTNTASDFSSDIRLSSELSGSINDLNTLDPNLLFDPGRQQGQDDEATLEELKNDPLFQQICSESMNSMTSSGFEWIESKDHPTVEMLG

SEQ ID NO: 1336 - protein, 664 aa, Homo sapiens
MEEMEEELKCPVCGSFYREPIILPCSHNLCQACARNILVQTPESESPQSHRAAGSGVSDYDYLDLDKMSLYSEADSGYGSYGGFASAPTTPCQKSPNGVRVFPPAMPPPATHLSPALAPVPRNSCITCPQCHRSLILDDRGLRGFPKNRVLEGVIDRYQQSKAAALKCQLCEKAPKEATVMCEQCDVFYCDPCRLRCHPPRGPLAKHRLVPPAQGRVSRRLSPRKVSTCTDHELENHSMYCVQCKMPVCYQCLEEGKHSSHEVKALGAMWKLHKSQLSQALNGLSDRAKEAKEFLVQLRNMVQQIQENSVEFEACLVAQCDALIDALNRRKAQLLARVNKEHEHKLKVVRDQISHCTVKLRQTTGLMEYCLEVIKENDPSGFLQISDALIRRVHLTEDQWGKGTLTPRMTTDFDLSLDNSPLLQSIHQLDFVQVKASSPVPATPILQLEECCTHNNSATLSWKQPPLSTVPADGYILELDDGNGGQFREVYVGKETMCTVDGLHFNSTYNARVKAFNKTGVSPYSKTLVLQTSEVAWFAFDPGSAHSDIILSNDNLTVTCSSYDDRVVLGKTGFSKGIHYWELTVDRYDNHPDPAFGVARMDVMKDVMLGKDDKAWAMYVDNNRSWFMHNNSHTNRTEGGITKGATIGVLLDFNRKNLTFFYQR

SEQ ID NO: 1337 - protein, 714 aa, Homo sapiens
MSEEIITPVYCTGVSAQVQKQRARELGLGRHENAIKYLGQDYEQLRVRCLQSGTLFRDEAFPPVPQSLGYKDLGPNSSKTYGIKWKRPTELLSNPQFIVDGATRTDICQGALGDCWLLAAIASLTLNDTLLHRVVPHGQSFQNGYAGIFHFQLWQFGEWVDVVVDDLLPIKDGKLVFVHSAEGNEFWSALLEKAYAKVNGSYEALSGGSTSEGFEDFTGGVTEWYELRKAPSDLYQIILKALERGSLLGCSIDISSVLDMEAITFKKLVKGHAYSVTGAKQVNYRGQVVSLIRMRNPWGEVEWTGAWSDSSSEWNNVDPYERDQLRVKMEDGEFWMSFRDFMREFTRLEICNLTPDALKSRTIRKWNTTLYEGTWRRGSTAGGCRNYPATFWVNPQFKIRLDETDDPDDYGDRESGCSFVLALMQKHRRRERRFGRDMETIGFAVYEVPPELVGQPAVHLKRDFFLANASRARSEQFINLREVSTRFRLPPGEYVVVPSTFEPNKEGDFVLRFFSEKSAGTVELDDQIQANLPDEQVLSEEEIDENFKALFRQLAGEDMEISVKELRTILNRIISKHKDLRTKGFSLESCRSMVNLMDRDGNGKLGLVEFNILWNRIRNYLSIFRKFDLDKSGSMSAYEMRMAIESAGFKLNKKLYELIITRYSEPDLAVDFDNFVCCLVRLETMFRFFKTLDTDLDGVVTFDLFKWLQLTMFA

SEQ ID NO: 1338 - protein, 247 aa, Homo sapiens
MEEQPQMQDADEPADSGGEGRAGGPPQVAGAQAACSEDRMTLLLRLRAQTKQQLLEYKSMVDASEEKTPEQIMQEKQIEAKIEDLENEIEEVKVAFEIKKLALDRMRLSTALKKNLEKISRQSSVLMDNMKHLLELNKLIMKSQQESWDLEEKLLDIRKKRLQLKQASESKLLEIQTEKNKQKIDLDSMENSERIKIIRQNLQMEIKITTVIQHVFQNLILGSKVNWAEDPALKEIVLQLEKNVDMM

SEQ ID NO: 1339 - protein, 900 aa, Homo sapiens
  VARIANT 31, 120: Xaa = Any Amino Acid
MSSKESCGKKETSQRKDTTTSSPNFGEKDKXERKTPASSTSSSSIRSVSSEKRKLKSDHTDVLYYNIKRRQGLKRLSVEIDTLRRRPKIGSSSQRPIKLKEASYSNDNQIILQSPSSNGXKKDIHKCVDFKPKDIKLTNAGSKLDHGIKSLSSPKIASDVKPKAEGQASENKWSHLLVQREKMKELKKGRNSKFRDNSEKCVLEKWKRNQFSQDYNSNKIIKEPLGSRRQKISFKIPIKSRDTLQKLVEENVFNIDSNNSKTKQEEREYLESSQVSLNVTRQKTEHLLSDFTYKRTVHEWKRKHHYDHQESNDSHSRENLTQSFEAPCCSVSSESIQDADQEMQIVEELHAARVGKSVDLPGELMSMEIDLEDDVHSSSANNTSDRKLLIVIDTNILMNHLKFVRILKTTEVPGFDKLVLIIPWVVMQEVDRMKEGKLLKRAQHKAIPAVHFINDSLKNQDRKLWGQSIQLASQKHYGLSDENNDDRVLKCCLQHQELFPCSFVILCTDDRNLRNKGLISGVKSLSKEELSAELLHLSLNTDVCHQPCIPKQQLKAETTPLKESYKEESTNSGLSILLESIVSDLEKSLGTGLSSILETEMKIAFGNLWMEILYLKPPWTLLHLLQCFKKHWLAVFGLVMEKNLLLTIESLYKNLRKANKAVDFTTVKFLLQDSRSLLHAFSTRSNYDGILPQTFAQVNNLLQTFAEVKTKLKPNSSENTVTKKQEGTSLKNSHNQEITVFSSSHLPQPSRHQEIWSILESVWITIYQNSTDVFQRLGSNSALTTSNIASFEEAFICLQKLMAAVRDILEGIQRILAPNSBYQDVETLYNFLIKYEVNKNVKFTAQEIYDCVSQTEYREKLTIGCRQLVEMEYTMQQCNASVYMEAKNRGWCEDMLNYRI

SEQ ID NO: 1340 - protein, 53 aa, Homo sapiens
QVVLEEGTIAFKNWVKTGTEVYRQFWIFDVQNPQEVMMNSSNIQVKQRGPYTY

SEQ ID NO: 1341 - protein, 30 aa, Homo sapiens
YNNTADGVYKVFNGKDNISKVAIIDTYKGK

SEQ ID NO: 1342 - protein, 1102 aa, Homo sapiens [sequence omitted]

SEQ ID NO: 1343 - protein, 267 aa, Homo sapiens
MKRLVCVLLVCSSAVAQLHKDPTLDHHWHLWKKTYGKQYKEKNEEAVRRLIWEKNLKFVMLHNLEHSMGMHSYDLGMNHLGDMTSEEVMSLTSSLRVPSQWQRNITYKSNPNRILPDSVDWREKGCVTEVKYQGSCGACWAFSAVGALEAQLKLKTGKLVTLSAQNLVDCSTEKYGNKGCNGGFMTTAFQYIIDNKGIDSDASYPYKAMDQKCQYDSKYRAATCSKYTELPYGREDVLKEAVANKGPVSVGVDARHPSFFLYRSGVY

SEQ ID NO: 1344 - protein, 201 aa, Homo sapiens
MGAGAETGRGQRAAAPERRHGRLLWLLRGLTLGTAPRRAVRGQAGGGGPGTAGIVGEAGSLATCELPLAKSEWQKKLTPEQFYVTREKGTEPPFSGIYLNNKEAGMYHCVCCDSPLFSSEKKYCSGTGWPSFSEAHGTSGSDESHTGILRRLDTSLGSARTEVVCKQCEAHLGHVFPDGPGPNGQRFCINSVALKFKPRKH

SEQ ID NO: 1345 - protein, 898 aa, Homo sapiens [sequence omitted]

SEQ ID NO: 1346 - protein, 469 aa, Homo sapiens
MGTVHARSLEPLPSSGPDFGGLGEEAEFVEVEPEAKQEILENKDVVVQHVHFDGLGRTKDDIIICEIGDVFKAKNLIEVMRKSHEAREKLLRLGIFRQVDVLIDTCQGDDALPNGLDVTFEVTELRRLTGSYNTMVGNNEGSMVLGLKLPNLLGRAEKVTFQFSYGTKETSYGLSFFKPRPGNFERNFSVNLYKVTGQFPWSSLRETDRGMSAEYSFPIWKTSHTVKWEGVWRELGCLSRTASFAVRKESGHSLKSSLSHAMVIDSRNSSILPRRGALLKVNQELAGYTGGDVSFIKEDFELQLNKQLIFDSVFSASFWGGMLVPIGDKPSSIADRFYLGGPTSIRGFSMHSIGPQSEGDYLGGEAYWAGGLHLYTPLPFRPGQGGFGELFRTHFFLNAGNLCNLNYGEGPKAHIRKLAECIRWSYGAGIVLRLGNIARLELNYCVPMGVQTGDRICDGVQFGAGIRFL

SEQ ID NO: 1347 - protein, 501 aa, Homo sapiens
MAASWRLGCDPRLLRYLVGFPGRRSVGLVKGALGWSVSRGANWRWFHSTQWLRGDPIKILMPSLSPTMEEGNIVKWLKKEGEAVSAGDALCEIETDKAVVTLDASDDGILAKIVVEEGSKNIRLGSLIGLIVEEGEDWKHVEIPKDVGPPPPVSKPSEPRPSPEPQISIPVKKEHIPGTLRFRLSPAARNILEKHSLDASQGTATGPRGIFTKEDALKLVQLKQTGKITESRPTPAPTATPTAPSPLQATAGPSYPRPVIPPVSTPGQPNAVGTFTEIPASNIRRVIAKRLTESKSTVPHAYATADCDLGAVLKVRQDLVKDDIKVSVNDFIIKAAAVTLKQMPDVNVSWDGEGPKQLPFIDISVAVATDKGLLTPIIKDAAAKGIQEIADSVKALSKKARDGKLLPEEYQGGSFSISNLGMFGIDEFTAVINPPQACILAVGRFRPVLKLTEDEEGNAKLQQRQLITVTMSSDSRVVDDELATRFLKSFKANLENPIRLA

SEQ ID NO: 1348 - protein, 837 aa, Homo sapiens
MSQTGSHPGRGLAGRWLWGAQPCLLLPIVPLSWLVWLLLLLLASLLPSARLASPLPREEEIVFPEKLNGSVLPGSGAPARLLCRLQAFGETLLLELEQDSGVQVEGLTVQYLGQAPELLGGAEPGTYLTGTINGDPESVASLHWDGGALLGVLQYRGAELHLQPLEGGTPNSAGGPGAHILRRKSPASGQGPMCNVKAPLGSPSPRPRRAKRFASLSRFVETLVVADDKMAAFHGAGLKRYLLTVMAAAAKAFKHPSIRNPVSLVVTRLVILGSGEEGPQVGPSAAQTLRSFCAWQRGLNTPEDSDPDHFDTAILFTRQDLCGVSTCDTLGMADVGTVCDPARSCAIVEDDGLQSAFTAAHELGHVFNMLHDNSKPCISLNGPLSTSRHVMAPVMAHVDPEEPWSPCSARFITDFLDNGYGHCLLDKPEAPLHLPVTFPGKDYDADRQCQLTFGPDSRHCPQLPPPCAALWCSGHLNGHAMCQTKHSPWADGTPCGPAQACMGGRCLHMDQLQDFNIPQAGGWGPWGPWGDCSRTCGGGVQFSSRDCTRPVPRNGGKYCEGRRTRFRSCNTEDCPTGSALTFREEQCAAYNHRTDLFKSFPGPMDWVPRYTGVAPQDQCKLTCQARALGYYYVLEPRVVDGTPCSPDSSSVCVQGRCIHAGCDRIIGSKKKFDKCMVCGGDGSGCSKQSGSFRKFRYGYNNVVTIPAGATHILVRQQGNPGHRSIYLALKLPDGSYALNGEYTLMPSPTDVVLPGAVSLRYSGATAASETLSGHGPLAQPLTLQVLVAGNPQDTRLRYSFFVPRPTPSTPRPTPQDWLHRRAQILEILRRRPWAGRK

SEQ ID NO: 1349 - protein, 2485 aa, Homo sapiens
MHVSLAEALEVRGGPLQEEEIWAVLNQSAESLQELFRKVSLADPAALGFIISPWSLLLLPSGSVSFTDENISNQDLRAFTAPEVLQNQSLTSLSDVEKIHIYSLGMTLYWGADYEVPQSQPIKLGDHLNSILLGMCEDVIYARVSVRTVLDACSAHIRNSNCAPSFSYVKHLVKLVLGNLSGTDQLSCNSEQKPDRSQAIRDRLRGKGLPTGRSSTSDVLDIQKPPLSHQTFLNKGLSKSMGFLSIKDTQDENYFKDILSDNSGREDSENTFSPYQFKTSGPEKKPIPGIDVLSKKKIWASSMDLLCTADRDFSSGETATYRRCHPEAVTVRTSTTPRKKEARYSDGSIALDIFGPQKMDPIYHTRELPTSSAISSALDRIRERQKKLQVLREAMNVEEPVRRYKTYHGDVFSTSSESPSIISSESDFRQVRRSEASKRFESSSGLPGVDETLSQGQSQRPSRQYETPFEGNLINQEIMLKRQEEELMQLQAKMALRQSRLSLYPGDTIKASMLDITRDPLREIALETAMTQRKLRNFFGPEFVKMTIEPFISLDLPRSILTKKGKNEDNRRKVNIMLLNGQRLELTCDTKTICKDVFDMVVAHIGLVEHHLFALATLKDNEYFFVDPDLKLTKVAPEGWKEEPKKKTKATVNFTLFFRIKFFMDDVSLIQHTLTCHQYYLQLRKDILEERMHCDDETSLLLASLALQAEYGDYQPEVHGVSYFRMEHYLPARVMEKLDLSYIKEELPKLHNTYVGASEKETELEFLKVCQRLTEYGVHFHRVHPEKKSQTGILLGVCSKGVLVFEVHNGVRTLVLRFPWRETKKISFSKKKITLQNTSDGIKHGFQTDNSKICQYLLHLCSYQHKFQLQMRARQSNQDAQDIERASFRSLNLQAESVRGFNMGRAISTGSLASSTLNKLAVRPLSVQAEILKRLSCSELSLYQPLQNSSKEKNDKASWEEKPREMSKSYHDLSQASLYPHRKNVIVNMEPPPQTVAELVGKPSHQMSRSDAESLAGVTKLNNSKSVASLNRSPERRKHESDSSSIEDPGQAYVLGMTMHSSGNSSSQVPLKENDVLHKRWSIVSSPEREITLVNLKKDAKYGLGFQIIGGEKMGRLDLGIFISSVAPGGPADLDGCLKPGDRLISVNSVSLEGVSHHAAIEILQNAPEDVTLVISQPKEKISKVPSTPVHLTNEMKNYMKKSSYMQDSAIDSSSKDHHWSRGTLRHISENSFGPSGGLREGSLSSQDSRTESASLSQSQVNGFFASHLGDQTWQESQHGSPSPSVISKATEKETFTDSNQSKTKKPGISDVTDYSDRGDSDMDEATYSSSQDHQTPKQESSSSVNTSNKMNFKTFSSSPPKPGDIFEVELAKNDNSLGISVTGGVNTSVRHGGIYVKAVIPQGAAESDGRIHKGDRVLAVNGVSLEGATHKQAVETLRNTGQVVHLLLEKGQSPTSKEHVPVTPQCTLSDQNAQGQGPEKVKKTTQVKDYSFVTEENTFEVKLFKNSSGLGFSFSREDNLIPEQINASIVRVKKLFPGQPAAESGKIDVGDVILKVNGASLKGLSQQEVISALRGTAPEVFLLLCRPPPGVLPEIDTALLTPLQSPAQVLPNSSKDSSQPSCVEQSTSSDENEMSDKSKKQCKSPSRRDSYSDSSGSGEDDLVTAPANISNSTWSSALHQTLSNMVSQAQSHHEAPKSQEDTICTMFYYPQKIPNKPEFEDSNPSPLPPDMAPGQSYQPQSESASSSSMDKYHIHHISEPTRQENWTPLKNDLENHLEDFELEVELLITLIKSEKGSLGFTVTKGNQRIGCYVHDVIQDPAKSDGRLKPGDRLIKVNDTDVTNMTHTDAVNLLRAASKTVRLVIGRVLELPRIPMLPHLLPDITLTCNKEELGFSLCGGHDSLYQVVYISDINPRSVAAIEGNLQLLDVIHYVNGVSTQGMTLEEVNRALDMSLPSLVLKATRNDLPVVPSSKRSAVSAPKSTKGNGSYSVGSCSQPALTPNDSFSTVAGEEINEISYPKGKCSTYQIKGSPNLTLPKESYIQEDDIYDDSQEAEVIQSLLDVVDEEAQNLLNENNAAGYSCGPGTLKMNGKLSEERTEDTDCDGSPLPEYFTEATKMNGCEEYCEEKVKSESLIQKPQEKKTDDDEITWGNDELPIERTNHEDSDKDHSFLTNDELAVLPVVKVLPSGKYTGANLKSVIRVLRGLLDQGIPSKELENLQELKPLDQCLIGQTKENRRKNRYKNILPYDATRVPLGDEGGYINASFIKIPVGKEEFVYIACQGPLPTTVGDFWQMIWEQKSTVIAMMTQEVEGEKIKCQRYWPNILGKTTMVSNRLRLALVRMQQLKGFVVRAMTLEDIQTREVRHISHLNFTAWPDHDTPSQPDDLLTFISYMRHIHRSGPIITHCSAGIGRSGTLICIDVVLGLISQDLDFDISDLVRCMRLQRHGMVQTEDQYIFCYQVILYVLTRLQAEEEQKQQPQLLK

SEQ ID NO: 1350 - protein, 897 aa, Homo sapiens [sequence omitted]

SEQ ID NO: 1351 - protein, 1845 aa, Homo sapiens [sequence omitted]

SEQ ID NO: 1352 - protein, 1816 aa, Homo sapiens
MSAGGRDEERRKLADIIHHWNANRLDLFEISQPTEDLEFHGVMRFYFQDKAAGNFATKCIRVSSTATTQDVIETLAEKFRPDMRMLSSPKYSLYEVHVSGERRLDIDEKPLVVQLNWNKDDREGRFVLKNENDAIPPKAQSNGPEKQEKEGVIQNFKRTLSKKEKKEKKKREKEALRQASDKDDRPFQGEDVENSRLAAEVYKDMPETSFTRTISNPEVVMKRRRQQKLEKRMQEFRSSDGRPDSGGTLRIYADSLKPNIPYKTILLSTTDPADFAVAEALEKYGLEKENPKDYCIARVMLPPGAQHSDEKGAKEIILDDDECPLQIFREWPSDKGILVFQLKRRPPDHIPKKTKKHLEGKTPKGKERADGSGYGSTLPPEKLPYLVELSPDGSDSRDKPKLYRLQLSVTEVGTEKLDDNSIQLFGPGIQPHHCDLTNMDGVVTVTPRSMDAETYVEGQRISETTMLQSGMKVQFGASHVFKFVDPSQDHALAKRSVDGGLMVKGPRHKPGIVQETTFDLGGDIHSGTALPTSKSTTRLDSDRVSSASSTAERGMVKPMIRVEQQPDYRRQESRTQDASGPELILPASIEFRESSEDSFLSAIINYTNSSTVHFKLSPTYVLYMACRYVLSNQYRPDISPTERTHKVIAVVNKMVSMMEGVIQKQKNIAGALAFWMANASELLNFIKQDRDLSRITLDAQDVLAHLVQMAFKYLVHCLQSELNNYMPAFLDDPEENSLQRPKIDDVLHTLTGAMSLLRRCRVNAALTIQLFSQLFHFINMWLFNRLVTDPDSGLCSHYWGAIIRQQLGHIEAWAEKQGLELAADCHLSRIVQATTLLTMDKYAPDDIPNINSTCFKLNSLQLQALLQNYHCAPDEPFIPTDLIENVVTVAENTADELARSDGREVQLEEDPDLQLPFLLPEDGYSCDVVRNIPNGLQEFLDPLCQRGFCRLIPHTRSPGTWTIYFEGADYESHLLRENTELAQPLRKEPEIITVTLKKQNGMGLSIVAAKGAGQDKLGIYVKSVVKGGAADDGRLAAGDQLLSVDGRSLVGLSQERAAELMTRTSSVVTLEVAKQGAIYHGLATLLNQPSPMMQRISDRRGSGKPRPKSEGFELYNNSTQNGSPESPQLPWAEYSEPKKLPGDDRLMKNRADHRSSPNVANQPPSPGGKSAYASGTTAKITSVSTGNLCTEEQTPPPRPEAYPIPTQTYTREYFTFPASKSQDRMAPPQNQWPNYEEKPHMHTDSNHSSIAIQRVTRSQEELREDKAYQLERHRIEAAMDRKSDSDMWINQSSSLDSSTSSQEHLNHSSKSVTPASTLTKSGPGRWKTPAAIPATPVAVSQPIRTDLPPPPPPPPVHYAGDFDGMSMDLPLPPPPSANQIGLPSAQVAAAERRKREEHQRWYEKEKARLEEERERKRREQERKLGQMRTQSLNPAPFSPLTAQQMKPEKPSTLQRPQETVIRELQPQQQPRTIERRDLQYITVSKEELSSGDSLSPDPWKRDAKEKLEKQQQMHIVDMLSKEIQELQSKPDRSAEESDRLRKLMLEWQFQKRLQESKQKDEDDEEEEDDDVDTMLIMQRLEAERRARLQDEERRRQQQLEEMRKREAEDRARQEEERRRQEEERTKRDAEEKRRQEEGYYSRLEAERRRQHDEAARRLLEPEAPGLCRPPLPRDYEPPSPSPAPGAPPPPPQRNASYLKTQVLSPDSLFTAKFVAYNEEEEEEDCSLAGQDKYSSTRKSHGDLLPAPLKPRPPPCQPRPASDGVFLSNSFQPPSAKANSTAHKKGQPLPPPKKSSSYHPSHCKGRGKRVTNQLSLS

SEQ ID NO: 1353 - protein, 501 aa, Homo sapiens
GASPLASPGGSPKGSPARSLARPGTPLPSPQAPRVDLQGAELWKRFHEIGTEMIITKAGRRMFPAMRVKISGLDPHQQYYIAMDIVPVDNKRYRYVYHSSKWMVAGNADSPVPPRVYIHPDSPASGETWMRQVISFDKLKLTNNELDDQGHIILHSMHKYQPRVHVIRKDCGDDLSPIKPVPSGEGVKAFSFPETVFTTVTAYQNQQITRLKIDRNPFAKGFRDSGRNRMGLEALVESYAFWRPSLRTLTFEDIPGIPKQGNASSSTLLQGTGNGVPATHPHLLSGSSCSSPAFHLGPNTSQLCSLAPADYSACARSGLTLNRYSTSLAETYNRLTNQAGETFAPPRTPSYVGVSSSTSVNMSMGGTDGDTFSCPQTSLSMQISGMSPQLQYIMPSPSSNAFATNQTHQGSYNTFRLHSPCALYGYNFSTSPKLAASPEKIVSSQGSFLGSSPSGTMTDRQMLPPVEGVHLLSSGGQQSFFDSRTLGSLTLSSSQVSAHMV

SEQ ID NO: 1354 - protein, 953 aa, Homo sapiens [sequence omitted]

SEQ ID NO: 1355 - protein, 803 aa, Homo sapiens
MEIPKLLPARGTLQGGGGGGIPAGGGRVHRGPDSPAGQVPTRRLLLLRGPQDGGPGRRREEASTASRGPGPSLLAPRTDQPSGGGGGGGDDFFLVLLDPVGGDVETAGSGQAAGPVLREEAEEGPGLQGGESGANPAGPTALGPRCLSAVPTPAPISAPGPAAAFAGTVTIHNQDLLLRFENGVLTLATPPPHAWEPGAAPAQQPGCLIAPQAGFPHAAHPGDCPELPPDLLLAEPAEPAPAPAPEEEAEGPAAALGPRGPLGSGPGVVLYLCPEAQCGQTFAKKHQLKVHLLTHSSSQGQRPFKCPLGGCGWTFTTSYKLKRHLQSHDKLRPFGCPAEGCGKSFTTVYNLKAHMKGHEQENSFKCEVCEESFPTQAKLSAHQRSHFEPERPYQCAFSGCKKTFITVSALFSHNRAHFREQELFSCSFPGCSKQYDKACRLKIHLRSHTGERPFLCDFDGCGWNFTSMSKLLRHKRKHDDDRRFMCPVEGCGKSFTRAEHLKGHSITHLGTKPFVCPVAGCCARFSARSSLYIHSKKHLQDVDTWKSRCPISSCNKLFTSKHSMKTHMVKRHKVGQDLLAQLEAANSLTPSSELTSQRQNDLSDAEIVSLFSDVPDSTSAALLDTALVNSGILTIDVASVSSTLAGHLPANNNNSVGQAVDPPSLMATSDPPQSLDTSLFFGTAATGFQQSSLNMDEVSSVSVGPLGSLDSLAMKNSSPEPQALTPSSKLTVDTDALTPSSTLCENSVSELLTPTKAEWNVHPDSDFFGQEGETQFGFPNAAGNHGSQKETDLITVTGSSFLV

SEQ ID NO: 1356 - protein, 731 aa, Homo sapiens
MVKPKYKGRSTINPSKASTNPDRVQGAGGQNMRDRATIRRLNMYRQKERRNSRGKIIKPLQYQSTVASGTVARVEPNIKWFGNTRVIKQSSLQKFQEEMDTVMKDPYKVVMKQSKLPMSLLHDRIRPHNLKVHILDTESFETTFGPKSQRKRPNLFASDMQSLIENAEMSTESYDQGKDRDLVTEDTGVRNEAQEEIYKKGQSKRIWGELYKVIDSSDVVVQVLDARDPMGTRSPHIETYLKKEKPWKHLIFVLNKCDLVPTWATKRWVAVLSQDYPTLAFHAILTNPFGKGAFIQLLRQFGKLHTDKKQISVGFIGYPNVGKSSVINTLRSKKVCNVAPIAGETKVWQYITLMRRIFLIDCPGVVYPSEDSETDIVLKGVVQVEKIKSPEDHIGAVLERAKPEYISKTYKIDSWENAEDFLEKLAFRTGKLLKGGEPDLQTVGKMVLNDWQRGRIPFFVKPPNAEPLVAPQLLPSSSLEVVPEAAQNNPGEEVTETAGEGSESIIKEETEENSHCDANTEMQQILTRVRQNFGKINVVPQFSGDDLVPVEVSDLEEELESFSDEEEEEQEQQRDDAEESSSEPEEENVGNDTKAVIKALDEKIAKYQKFLDKAKAKKFSAVRISKGLSEKIFAKPEEQRKTLEEDVDDRAPSKKGKKRKAQREEEQEHSNKAPRALTSKERRRAVRQQRPKKVGVRYYETHNVKNRNRNKKKTNDSEGQKHKRKKFRQKQ

SEQ ID NO: 1357 - protein, 574 aa, Homo sapiens
MVDDEELAQHPATTEDIRVCCQDIRVLGRKELRSLLNWRTKLRRYVAKKLKEQAKALDISLSSGEEDEGDEEDSTAGTTKQPSKEEEEEEEEEQLNQTLAEMKAQEVAELKRKKKKLLREQRKQRERVELKMDLPGVSIADEGETGMFSLCTIRGHQLLEEVTQGDMSAADTFLSDLPRDDIYVSDVEDDGDDTSLDSDLDPEELAGVRGHQGLRDQKRMRLTEVQDDKEEEEEENPLLVPLEEKAVLQEEQANLWFSKGSFAGIEDDADEALEISQAQLLFENRRKGRQQQQKQQLPQTPPSCLKTEIMSPLYQDEAPKGTEASSGTEAATGLEGEEKDGISDSDSSTSSEEEESWEPLRGKKRSRGPKSDDDGFEIVPIEDPAKHRILDPEGLALGAVIASSKKAKRDLIDNSFNRYTFNEDEGELPEWFVQEEKQHRIRQLPVGKKEVEHYRKRWREINARPIKKVAEAKARKKRRMLKRLEQTRKKAEAVVNTVDISEREKVAQLRSLYKKAGLGKEKRHVTYVVAKKGVGRKVRRPAGVRGHFKVVDSRMKKDQRAQQRKEQKKKHKRK

SEQ ID NO: 1358 - protein, 647 aa, Homo sapiens
MARAGPRLVLSEEAVRAKSGLGPHRDLAELQSLSIPGTYQEKITHLGHSLMSLTGLKSLDLSRNSLVSLEGIQYLTALESLNLYYNCISSLAEVFRLHALTELVDVDFRLNPVVKVEPDYRLFVVHLLPKLQQLDDRPVRASERKASRLHFASEDSLDSKESVPASLKEGRPHHPRAKCTEALAKQSLVMDADDEAVLNLIAECEWDLGRPPGSTSFSQKGREADSRGSQESRHLLSPQLVQYQCGDSGKQGRETRRSSCRGCCLEKMPWSQLCGELPPLYGAEPEASRAPRPHTYFTPHPDSMDTEDSASSQKLDLSGEMVPGPLPAPGKCRKRRMPVGRFQTFSDQEGLGCPERTHGSSVPKESLSRQDSSESRNGRTLSQPEASETEEQRSRGVTDTREPSPGSHSALPGKKTALQAALLETLLDLVDRSWGGCRSLHSNEAFLAQARHILSSVEEFTAAQDSSAMVGEDVGSLALESKSLQSRLAEQQQQHAREMSEVTAELHHTHKELDDLRQHLDKSLEENSRLKSLLLSMKKEVKSADTAATLNLQIAGLQTSVKRLCGEIVELKQHLEHYDKIQELTQMLQESHSSLVSTNEHLLQELSQVRAQHRAEVEQMHWSYQELKKTMALFPHSSASHGGCQAC

SEQ ID NO: 1359 - protein, 555 aa, Homo sapiens
PRVRAHSAAMEQRRVTDFFARRRPGPPRIAPPKLACRTPSPARPALRAPASATSGSRKRARPPAAPGRDQARPPARRRLRLSVDEVSSPSTPEAPDIPACPSPGQKIKKSTPAAGQPPHLTSAQDQDTISELASCLQRARELGARVRALKASAQDAGESCTPEAEGRPEEPCGEKAPAYQRFHALAQPGLPGLVLPYKYQVLAEMFRSMDTIVGMLHNRSETPTFAKVQRGVQDMMRRRFEERNVGQIKTVYPASYRFRQERSVPTFKDGTRRSDYQLTIEPLLEQEADGAAPQLTASRLLQRRQIFSQKLVEHVKEHHKAFLASLSPAMVVPEDQLTRWHPRFNVDEVPDIEPAALPQPPATEKLTTAQEVLARARNLISPRMEKALSQLALRSAAPSSPGSPRPALPATPPATPPAASPSALKGVSQDLLERIRAKEAQKQLAQMTRCPEQEQRLQRLERLPELARVLRSVFVSERKPALSMEVACARMVGSCCTIMSPGEMEKHLLLLSELLPDWLSLHRIRTDTYVKLDKAADLAHITARLAHQTRAEEGL

SEQ ID NO: 1360 - protein, 433 aa, Homo sapiens
MSGRPRTTSFAESCKPVQQPSAFGSMKVSRDKDGSKVTTVVATPGQGPDRPQEVSYTDTKVIGNGSFGVVYQAKLCDSGELVAIKKVLQDKRFKNRELQIMRKLDHCNIVRLRYFFYSSGEKKDEVYLNLVLDYVPETVYRVARHYSRAKQTLPVIYVKLYMYQLFRSLAYIHSFGICHRDIKPQNLLLDPDTAVLKLCDFGSAKQLVRGEPNVSYICSRYYRAPELIFGATDYTSSIDVWSAGCVLAELLLGQPIFPGDSGVDQLVEIIKVLGTPTREQIREMNPNYTEFKFPQIKAHPWTKDSSGTGHFTSGVRVFRPRTPPEAIALCSRLLEYTPTARLTPLEACAHSFFDELRDPNVKLPNGRDTPALFNFTTQELSSNPPLATILIPPHARIQAAASTPTNATAASDANTGDRGQTNNAASASASNST

SEQ ID NO: 1361 - protein, 151 aa, Homo sapiens
MAASSQGNFEGNFESLDLAEFAKKQPWWRKLFGQESGPSAEKYSVATQLFIGGVTGWCTGFIFQKVGKLAATAVGGGFFLLQLANHTGYIKVDWQRVEKDMKKAKEQLKIRKSNQIPTEVRSKAEEVVSFVKKNVLVTGGFFGGFLLGMAS

SEQ ID NO: 1362 - protein, 243 aa, Homo sapiens [sequence omitted]

SEQ ID NO: 1363 - protein, 254 aa, Homo sapiens [sequence omitted]

SEQ ID NO: 1364 - protein, 430 aa, Homo sapiens
MALLHSGRVLPGIAAAFHPGLAAAASARASSWWTHVEMGPPDPILGVTEAFKRDTNSKKMNLGVGAYRDDNGKPYVLPSVRKAEAQIAAKNLDKEYLPIGGLAEFCKASAELALGENSEVLKSGRFVTVQTISGTGALRIGASFLQRFFKFSRDVFLPKPTWGNHTPIFRDAGMQLQGYRYYDPKTCGFDFTGAVEDISKIPEQSVLLLHACAHNPTGVDPRPEQWKEIATVVKKRNLFAFFDMAYQGFASGDGDKDAWAVRHFIEQGINVCLCQSYAKNMGLYGERVGAFTMVCKDADEAKRVESQLKILIRPMYSNPPLNGARIAAAILNTPDLRKQWLQEVKVMADRIIGMRTQLVSNLKKEGSTHNWQHITDQIGMFCFTGLKPEQVERLIKEFSIYMTKDGRISVAGVTSSNVGYLAHAIHQATK

SEQ ID NO: 1365 - protein, 164 aa, Homo sapiens
HEGEPSGAAVSRSPLSPPSRPFASREPAGFRAALADPPGMPRYELALILKAMQRPETAATLKRTIEALMDRGAIVRDLENLGERALPYRISAHSQQHNRGGYFLVDFYAPTAAVESMVEHLSRDIDVIRGNIVKHPLTQELKECEGIVPVPLAEKLYSTKKRKK

SEQ ID NO: 1366 - protein, 219 aa, Homo sapiens
HEAEQGGGGGGTCGAGARAMGRLHCTEDPVPEAVGGDMQQLNQLGAQQFSALTEVLFHFLTEPKEVERFLAQLSEFATTNQISLGSLRSIVKSLLLVPNGALKKSLTAKQVQADFITLGLSEEKATYFSEKWKQNAPTLARWAIGQTLMINQLIDMEWKFGVTSGSSELEKVGSIFLQLKLVVKKGNQTENVYIELTLPQFYSFLHEMERVRTSMECFC

SEQ ID NO: 1367 - protein, 401 aa, Homo sapiens
MPKIVLNGVTVDFPFQPYKCQQEYMTKVLECLQQKVNGILESPTGTGKTLCLLCTTLAWREHLRDGISARKIAERAQGELFPDRALSSWGNAAAAVGDPIACYTDIPKIIYASRTHSQLTQVINELRNTSYRSLLRPGHVSVMLTSSDRRGSCVSPYSSRCRATLWVLETAPPRPTVLSPTRPKVCVLGSREQLCIHPEVKKQESNHLQIHLCRKKVASRSCHFYNNVEEKSLEQELASPILDIDDLVKSGSKHRVCPYYLSRNLKQQADIIFMPYNYLLDAKSRRAHNIDLKGTVVIFDEAHNVEKMCEESASFDLTPHDLASGLDVIDQVLEEQTKAAQQGEPHPEFSADSPSPGCPQCCQCLSADWLPNCCISTPFYHQRVQTSPGLVCGDGLHLPTC

SEQ ID NO: 1368 - protein, 308 aa, Homo sapiens [sequence omitted]

SEQ ID NO: 1369 - protein, 401 aa, Homo sapiens
MADPKYADLPGIARNEPDVYETSDLPEDDQAEFDAEELTSTSVEHIIVNPNAAYDKFKDKRVGTKGLDFSDRIGKTKRTGYESGEYEMLGEGLGVKETPQQKYQRLLHEVQELTTEVEKIKTTVKESATEEKLTPVLLAKQLAALKQQLVASHLEKLLGPDAAINLTDPDGALAKRLLLQLEATKNSKGGSGGKTTGTPPDSSLVTYELHSRPEQDKFSQAAKVAELEKRLTELETAVRCDQDAQNPLSAGLQGACLMETVELLQAKVSALDLAVLDQVEARLQSVLGKVNEIAKHKASVEDADTQSKVHQLYETIQRWSPIASTLPELVQRLVTIKQLHEQAMQFGQLLTHLDTTQQMIANSLKDNTTLLTQVQTTMRENLATVEGNFASIDERMKKLGK

SEQ ID NO: 1370 - protein, 230 aa, Homo sapiens
EMPEDTEDLDHYEMKEEEPAEGKKSEDDGIGKENLAILEKIKKNQRQDYLNGAVSGSVQATDRLMKELRDIYRSQSFKGGNYAVELVNDSLYDWNVKLLKVDQDSALHNDLQILKEKEGADFILLNFSFKDNFPFDPPFVRVVSPVLSGGYVLGGGAICMELLTKQGWSSAYSIESVIMQISATLVKGKARVQFGANKSQYSLTRAQQSYKSLVQIHEKNGWYTPPKEDG

SEQ ID NO: 1371 - protein, 248 aa, Homo sapiens
MICTFLRAVQYTEKLHRSSAKRLLLPYIVLNKACLKTEPSLRCGLQYQKKTLRPRCILGVTQKTIWTQGPSPRKAKEDGSKQVSVHRSQRGGTAVPTSQKVKEAGRDFTYLIVVLFGISITGGLFYTIFKELFSSSSPSKIYGRALEKCRSHPEVIGVFGESVKGYGEVTRRGRRQHVRFTEYVKDGLKHTCVKFYIEGSEPGKQGTVYAQVKENPGSGEYDFRYIFVEIESYPRRTIIIEDNRSQDD

SEQ ID NO: 1372 - protein, 633 aa, Homo sapiens
AALGSSSGSASPAVAELCQNTPETFLEASKLLLTYADNILRNPNDEKYRSIRIGNTAFSTRLLPVRGAVECLFEMGFEEGETHLIFPKKASVEQLQKIRDLIAIERSSRLDGSNKSHKVKSSQQPAASTQLPTTPSSNPSGLNQHTRNRQGQSSDPPSASTVAADSAILEVLQSNIQHVLVYENPALQEKALACIPVQELKRKSQEKLSRARKLDKGINISDEDFLLLELLHWFKEEFFHWVNNVLCSKCGGQTRSRDRSLLPSDDELKWGAKEVEDHYCDACQFSNRFPRYNNPEKLLETRCGRCGEWANCFTLCCRAVGFEARYVWDYTELQRTLSLKLTTLKEIGKTFLRISKRQKLIQVVDVTWRYSCKHEEVIARRTKVKEALLRDTINGLNKQRQLFLSENRRKELLQRIIVELVEFISPKTPKPGELGGRISGSVAWRVARGEMGLQRKETLFIPCENEKISKQLHLCYNIVKDRYVRVSNNNQTISGWENGVWKMESIFRKVETDWHMVYLARKEGSSFAYISWKFECGSVGLKVDSISIRTSSQTFQTGTVEWKLRSDTAQVELTGDNSLHSYADFSGATEVILEAELSRGDGDVAWQHTQLFRQSLNDHEENCLEIIIKFSDL

SEQ ID NO: 1373 - protein, 399 aa, Homo sapiens
MQSLSLGQTSISKGLNYLTIMAPGNLWHMRNNFLFGSRCWMTRFSAENIFKSVSFRLFGVKCHNTDSEPLKNEDLLKNLLTMGVDIDMARKRQPGVFHRMITNEQDLKMFLLSKGASKEVIASIISRYPRAITRTPENLSKRWDLWRKIVTSDLEIVNILERSPESFFRSNNNLNLENNIKFLYSVGLTRKCLCRLLTNAPRTFSNSLDLNKQMVEFLQAAGLSLGHNDPTDFVRKIIFKNPFILIQSTKRVKANIEFLRSTFNLNSEELLVLICGPGAEILDLSNDYARRSYANIKEKLFSLGCTEEEVQKFVLSYPDVIFLAEKKFNDKIDCLMEENISISQIIENPRVLDSSISTLKSRIKELVNAGCNLSTLNITLLSWSKKRYEAKLKKLSRFA

SEQ ID NO: 1374 - protein, 293 aa, Homo sapiens [sequence omitted]

SEQ ID NO: 1375 - protein, 344 aa, Homo sapiens
MAAIYGGVEGGGTRSEVLLVSEDGKILAEADGLSTNHWLIGTDKCVERINEMVNRAKRKAGVDPLVPLRSLGLSLSGGDQEDAGRILIEELRDRFPYLSESYLITTDAAGSIATATPDGGVVLISGTGSNCRLINPDGSESGCGGWGHMMGDEGSAYWIAHQAVKIVFDSIDNLEAAPHDIGYVKQAMFHYFQVPDRLGILTHLYRDFDKCRFAGFCRKIAEGAQQGDPLSRYIFRKAGEMLGRHIVAVLPEIDPVLFQGKIGLPILCVGSVWKSWELLKEGFLLALTQGREIQAQNFFSSFTLMKLRHSSALGGASLGARHIGHLLPMDYSANAIAFYSYTFS

SEQ ID NO: 1376 - protein, 287 aa, Homo sapiens
FLRRGPWAQLPARFCSRDPAGAGRRESEPRPTSARQLDGIRNIVLSNPKKRNTLSLAMLKSLQSDILHDADSNDLKVIIISAEGPVFSSGHDLKELTEEQGRDYHAEVFQTCSKVMMHIRNHPVPVIAMVNGLATAAGCQLVASCDIAVASDKSSFATPGVNVGLFCSTPGVALARAVPRKVALEMLFTGEPISAQEALLHGLLSKVVPEAELQEETMRIARKIASLSRPVVSLGKATFYKQLPQDLGTAYYLTSQAMVDNLALRDGQEGITAFLQKRKPVWSHEPV

SEQ ID NO: 1377 - protein, 534 aa, Homo sapiens
MRPDDKYHEKQAQVEATKLKQKVEALSPGDRQQIYEKGLELRSQQSKPQDASCLPALKVSDIEPTIPVTELDVVLTAGDIPVQYCAQPTNGMVYFRAFSSLNTLPEELRPYVPLFCSVLTKLGCGLLDYREQAQQIELKTGGMSASPHVLPDDSHMDTYEQGVLFSSLCLDRNLPDMMQLWSEIFNNPCFEEEEHFKVLVKMTAQELANGIPDSGHLYASIRAGRTLTPAGDLQETFSGMDQVRLMKRIAEMTDIKPILRKLPRIKKHLLNGDNMRCSVNATPQQMPQTEKAVEDFLRSIGRSKKERRPVRPHTVEKPVPSSSGGDAHVPHGSQVIRKLVMEPTFKPWQMKTHFLMPFPVNYVGECIRTVPYTDPDHASLKILARLMTAKFLHTEIREKGGAYGGGAKLSHNGIFTLYSYRDPNTIETLQSFGKAVDWAKSGKFTQQDIDEAKLSVFSTVDAPVAPSDKGMDHFLYGLSDEMKQAHREQLFAVSHDKLLAVSDRYLGTGKSTHGLAILGPENPKIAKDPSWIIR

SEQ ID NO: 1378 - protein, 427 aa, Homo sapiens [sequence omitted]

SEQ ID NO: 1379 - protein, 373 aa, Homo sapiens
MWVCSTLWRVRTPARQWRGLLPASGCHGPAASSYSASAEPARVRALVYGHHGDPAKVVELKNLELAAVRGSDVRVKMLAAPINPSDINMIQGNYGLLPELPAVGGNEGVAQVVAVGSNVTGLKPGDWVIPANAGLGTWRTEAVFSEEALIQVPSDIPLQSAATLGVNPCTAYRMLMDFEQLQPGDSVIQNASNSGVGQAVIQIAAALGLRTINVVRDRPDIQKLSDRLKSLGAEHVITEEELRRPEMKNFFKDMPQPRLALNCVGGKSSTELLRQLARGGTMVTYGGMAKQPVVASVSLLIFKDLKLRGFWLSQWKKDHSPDQFKELILTLCDLIRRGQLTAPACSQVPLQDYQSALEASMKPFISSKQILTM

SEQ ID NO: 1380 - protein, 313 aa, Homo sapiens
METRSPGLNNMKPQSLQLVLEEQVLALQQQMAENQAASWRKLKNSQEAQQRQATLVRKLQAKVLQYRSWCQELEKRLEATGGPIPQRWENVEEPNLDELLVRLEEEQQRCESLAEVNTQLRLHMEKADVVNKALREDVEKLTVDWSRARDELMRKESQWQMEQEFFKGYLKGEHGRLLSLWREVVTFRRHFLEMKSATDRDLMELKAEHVRLSGSLLTCCLRLTVGAQSREPNGSGRMDGREPAQLLLLLAKTQELEKEAHERSQELIQLKSQGDLEKAELQDRVTELSALLTQSQKQNEDYEKMIKALRETF

SEQ ID NO: 1381 - protein, 702 aa, Homo sapiens
HEVRALLLWGRRLRPLLRAPALAAVPGGKPILCPRRTTAQLGPRRNPAWSLQAGRLFSTQTAEDKEEPLHSIISSTESVQGSTSKHEFQAETKKLLDIVARSLYSEKEVFIRELISNASDALEKLRHKLVSDGQALPEMEIHLQTNAEKGTITIQDTGIGMTQEELVSNLGTIARSGSKAFLDALQNQAEASSKIIGQFGVGFYSAFMVADRVEVYSRSAAPGSLGYQWLSDGSGVFEIAEASGVRTGTKIIIHLKSDCKEFSSEARVRDVVTKYSNFVSFPLYLNGRRMNTLQAIWMMDPKDVGEWQHEEFYRYVAQAHDKPRYTLHYKTDAPLNIRSIFYVPDMKPSMFDVSRELGSSVALYSRKVLIQTKATDILPKWLRFIRGVVDSEDIPLNLSRELLQESALIRKLRDVLQQRLIKFFIDQSKKDAEKYAKFFEDYGLFMREGIVTATEQEVKEDIAKLLRYESSALPSGQLTSLSEYASRMRAGTRNIYYLCAPNRHLAEHSPYYEAMKKKDTEVLFCFEQFDELTLLHLREFDKKKLISVETDIVVDHYKEEKFEDRSPAAECLSEKETEELMAWMRNVLGSRVTNVKVTLRLDTHPAMVTVLEMGAARHFLRMQQLAKTQEERAQLLQPTLEINPRHALIKKLNQLCASEPGLAQLLVDQIYENAMIAAGLVDDPRAMVGRLNELLVKALERH

SEQ ID NO: 1382 - protein, 30 aa, Homo sapiens
CHLGQAPYWIKTFAKGTRLIVTSPGNKQLD

SEQ ID NO: 1383 - protein, 1539 aa, Homo sapiens
TLFKDASGNLDKNARFSAIYRQDSNKLSNDDMLKLLADFRKPEKMAKLPVILGNLDITIDNVSSDFPNYVNSSYIPTKQFETCSKTPITFEVEEFVPCIPKHTQPYTIYTNHLYVYPKYLKYDSQKSFAKARNIAICIEFKDSDEEDSQPLKCIYGRPGGPVFTRSAFAAVLHHHQNPEFYDEIKIELPTQLHEKHHLLLTFFHVSCDNSSKGSTKKRDVVETQVGYSWLPLLKDGRVVTSEQHIPVSANLPSGYLGYQELGMGRHYGPEIKWVDGGKPLLKISTHLVSTVYTQDQHLHNFFQYCQKTESGAQALGNELVKYLKSLHAMEGHVMIAFLPTILNQLFRVLTRATQEEVAVNVTRVIIHVVAQCHEEGLESHLRSYVKYAYKAEPYVASEYKTVHEELTKSMTTILKPSADFLTSNKLLKYSWFFFDVLIKSMAQHLIENSKVKLLRNQRFPASYHHAVETVVNMLMPHITQKFRDNPEASKNANHSLAVFIKRCFTFMDRGFVFKQINNYISCFAPGDPKTLFEYKFEFLRVVCNHEHYIPLNLPMPFGKGRIQRYQDLQLDYSLTDEFCRNHFLVGLLLREVGTALQEFREVRLIAISVLKNLLIKHSFDDRYASRSHQARIATLYLPLFGLLIENVQRINVRDVSPFPVNAGMTVKDESLALPAVNPLVTPQKGSTLDNSLHKDLLGAISGIASPYTTSTPNINSVRNADSRGSLISTDSGNSLPERNSEKSNSLDKHQQSSTLGNSVVRCDKLDQSEIKSLLMCFLYILKSMSDDALFTYWNKASTSELMDFFTISEVCLHQFQYMGKRYIARTGMMHARLQQLGSLDNSLTFNHSYGHSDADVLHQSLLEANIATEVCLTALDTLSLFTLAFKNQLLADHGHNPLMKKVFDVYLCFLQKHQSETALKNVFTALRSLIYKFPSTFYEGRADMCAALCYEILKCCNSKLSSIRTEASQLLYFLMRNNFDYTGKKSFVRTHLQVIISVSQLIADVVGIGGTRFQQSLSIINNCANSDRLIKHTSFSSDVKDLTKRIRTVLMATAQMKEHENDPEMLVDLQYSLAKSYASTPELRKTWLDSMARIHVKNGDLSEAAMCYVHVTALVAEYLTRKEAVQWEPPLLPHSHSACLRRSRGGVFRQGCTAFRVITPNIDEEASMMEDVGMQDVHFNEDVLMELLEQCADGLWKAERYELIADIYKLIIPIYEKRRDFERLAHLYDTLHRAYSKVTEVMHSGRRLLGTYFRVAFFGQAAQYQFTDSETDVEGFFEDEDGKEYIYKEPKLTPLSEISQRLLKLYSDKFGSENVKMIQDSGKVNPKDLDSKYAYIQVTHVIPFFDEKELQERKTEFERSHNIRRFMFEMPFTQTGKRQGGVEEQCKRRTILTAIHCFPYVKKRIPVMYQHHTDLNPIEVAIDEMSKKVAELRQLCSSAEVDMIKLQLKLQGSVSVQVNAGPLAYARAFLDDTNTKRYPDNKVKLLKEVFRQFVEACGQALAVNERLIKEDQLEYQEEMKANYREMAKELSEIMHEQLG

SEQ ID NO: 1384 - protein, 878 aa, Homo sapiens
MATAPSYPAGLPGSPGPGSPPPPGGLELQSPPPLLPQIPAPGSGVSFHIQIGLTREFVLLPAASELAHVKQLACSIVDQKFPECGFYGLYDKILLFKHDPTSANLLQLVRSSGDIQEGDLVEVVLSASATFEDFQIRPHALTVHSYRAPAFCDHCGEMLFGLVRQGLKCDGCGLNYHKRCAFSIPNNCSGARKRRLSSTSLASGHSVRLGTSESLPCTAEELSRSTTELLPRRPPSSSSSSSASSYTGRPIELDKMLLSKVKVPHTFLIHSYTRPTVCQACKKLLKGLFRQGLQCKDCKFNCHKRCATRVPNDCLGEALINGDVPMEEATDFSEADKSALMDESEDSGVIPGSHSENALHASEEEEGEGGKAQSSLGYIPLMRVVQSVRHTTRKSSTTLREGWVVHYSNKDTLRKRHYWRLDCKCITLFQNNTTNRYYKEIPLSEILTVESAQNFSLVPPGTNPHCFEIVTANATYFVGEMPGGTPGGPSGQGAEAARGWETAIRQALMPVILQDAPSAPGHAPHRQASLSISVSNSQIQENVDIATVYQIFPDEVLGSGQFGVVYGGKHRKTGRDVAVKVIDKLRFPTKQESQLRNEVAILQSLRHPGIVNLECMFETPEKVFVVMEKLHGDMLEMILSSEKGRLPERLTKFLITQILVALRHLHFKNIVHCDLKPENVLLASADPFPQVKLCDFGFARIIGEKSFRRSVVGTPAYLAPEVLLNQGYNRSLDMWSVGVIMYVSLSGTFPFNEDEDINDQIQNAAFMYPASPWSHISAGAIDLINNLLQVKMRKRYSVDKSLSHPWLQEYQTWLDLRELEGKMGERYITHESDDARWEQFAAEHPLPGSGLPTDRDLGGACPPQDHDMQGLAERISVL

SEQ ID NO: 1385 - protein, 711 aa, Homo sapiens
MKLKLNVLTIILLPVHLLITIYSALIFIPWYFLTNAKKKNAMAKRIKAKPTSDKPGSPYRSVTHFDSLAVIDIPGADTLDKLFDHAVSKFGKKDSLGTREILSEENEMQPNGKVFKKLILGNYKWMNYLEVNRRVNNFGSGLTALGLKPKNTIAIFCETRAEWMIAAQTCFKYNFPLVTLYATLGKEAVVHGLNESEASYLITSVELLESKLKTALLDISCVKHIIYVDNKAINKAEYPEGFEIHSMQSVEELGSNPENLGIPPSRPTPSDMAIVMYTSGSTGRPKGVMMHHSNLIAGMTGQCERIPGLGPKDTYIGYLPLAHVLELTAEISCFTYGCRIGYSSPLTLSDQSSKIKKGSKGDCTVLKPTLMAAVPEIMDRIYKNVMSKVQEMNYIQKTLFKIGYDYKLEQIKKGYDAPLCNLLLFKKVKALLGGNVRMMLSGGAPLSPQTHRFMNVCFCCPIGQGYGLTESCGAGTVTEVTDYTTGRVGAPLICCEIKLKDWQEGGYTINDKPNPRGEIVIGGQNISMGYFKNEEKTAEDYSVDENGQRWFCTGDIGEFHPDGCLQIIDRKKDLVKLQAGEYVSLGKVEAALKNCPLIDNICAFAKSDQSYVISFVVPNQKRLTLLAQQKGVEGTWVDICNNPAMEAEILKEIREAANAMKLERFEIPIKVRLSPEPWTPETGLVTDAFKLKRKELRNHYLKDIERMYGGK

SEQ ID NO: 1386 - protein, 1437 aa, Homo sapiens [sequence omitted]

SEQ ID NO: 1387 - protein, 276 aa, Homo sapiens
ADLSVTEASSSDSRGERAELYAQVEEGLLGGEASYLGPPLTPEKDDALHQATAVANLRAALMSKNSLLSLKADVLGDDGSLLFEYLPRGAHSLSLNEFTVIRKKFKCPYCSFSAMHQCILKRHMRSHTGERPYPCEICGKKFTRREHMKRHTLVHSKDKKYVCKVCSRVFMSAASVGIRHGSRRHGVCTDCAGRGMAGPLDHGGGGGEGSPEALFPGDGPYLEDPEDPRGEAEELGEDDEGLAPEDALLADDKDEEDSPRPRSPPGGPDKDFAWLS

SEQ ID NO: 1388 - protein, 216 aa, Homo sapiens
MKSISLLRYQEESKTLSLVSRDAKPLEVYSVDFMVDNAQLGFLVSDRDRNLMVYMYLPEAKESFGGMRLLRRADFHVGAHVNTFWRTPCRGATEGLSKKSVVWENKHITWFATLDGGIGLLLPMQEKTYRRLLMLQNALTTMLPHHAGLNPRAFRMLHVDRRTLQNAVRNVLDGELLNRYLYLSTMERSELAKKIGTTPDIILDDLLETDRVTAHF

SEQ ID NO: 1389 - protein, 521 aa, Homo sapiens
HVLQFMYYGTIELSMNTVHEILQAAMYVQLIEVVKFCCSFLLAKICLENCAEIMRLLDDFGVNIEGVREKLDTFLLDNFVPLMSRPDFLSYLSFEKLMSYLDNDHLSRFPEIELYEAVQSWLRHDRRRWRHTDTIIQNIRFCLMTPTSVFEKVKTSEFYRYSRQLRYEVDQALNYFQNVHQQPLLDMKSSRIRSAKPQTTVFRGMIGHSMVNSKILLLKKPRVWWELEGPQVPLRPDCLAIVNNFVFLLGGEELGPDGEFHASSKVFRYDPRQNSWLQMADMSVPRSEFAVGVIGKFIYAVAGRTRDETFYSTERYDITNDKWEFVDPYPVNKYGHEGTVLNNKLFITGGITSSSTSKQVCVFDPSKEGTIEQRTRRTQVVTNCWENKSKMNYARCFHKMISYNGKLYVFGGVCVILRASFESQGCPSTEVYNPETDQWTILASMPIGRSGHGVTVLDKQIMVLGGLCYNGHYSDSILTFDPDENKWKEDEYPRMPCKLDGLQVCNLHFPDYVLDEVRRCN

SEQ ID NO: 1390 - protein, 1536 aa, Homo sapiens
GWTSHLSNCGESNRPPKERSCFRVCDWHSDLFQWEVSDWHHCVLVPYARGEVKPRTAECVTAQHGLQHRMVRCIQKLNRTVVANEICEHFALQPPTEQACLIPCPRDCVVSEFLPWSNCSKGCGKKLQHRTRAVIAPPLFGGLQCPNLTESRACDAPISCPLGEEEYTFSLKVGPWSKCRLPHLKEINPSGRTVLDFNSDSNERVTFKHQSYKAHHHSKSWAIEIGYQTRQVSCTRSDGQNAMLSLCLQDSFPLTVQSCIMPKDCETSQWSSWSPCSKTCRSGSLLPGFRSRSRNVKHMAIGGGKECPELLEKEACIVEGELLQQCPRYSWRTSEWKECQVSLLLEQQDPHWHVTGPVCGGGIQTREVYCAQSVPAAAALRAKEVSRPVEKALCVGPAPLPSQLCNIPCSTDCIVSSWSAWGLCIHENCHEPQGKKGFRTRQRHVLMESTGPAGHCPHLVESVPCEDPMCYRWLASEGICFPDHGKCGLGHRILKAVCQNDRGEDVSGSLCPVPPPPERKSCEIPCRMDCVLSEWTEWSSCSQSCSNKNSDGKQTRSRTILALAGEGGKPCPPSQALQEHRLCNDHSCMQLHWETSPWGPCSEDTLVTALNATIGWNGEATCGVGIQTRRVFCVKSHVGQVMTKRCPDSTRPETVRPCFLPCKKDCIVTAFSEWTPCPRMCQAGNATVKQSRYRIIIQEAANGGQECPDTLYEERECEDVSLCPVYRWKPQKWSPCILVPESVWQGITGSSEACGKGLQTRAVSCISDDNRSAEMMECLKQTNGMPLLVQECTVPCREDCTFTAWSKFTPCSTNCEATKSRRRQLTGKSRKKEKCQDSDLYPLVETELCPCDEFISQPYGNWSDCILPEGRREPHRGLRVQADSKECGEGLRFRAVACSDKNGRPVDPSFCSSSGYIQEKCVIPCPFDCKLSDWSSWGSCSSSCGIGVRIRSKWLKEKPYNGGRPCPKLDLKNQAQVHEAVPCYSECNQYSWVVEHWSSCKINNELRSLRCGGGTQSRKIRCVNTADGEGGAVDSNLCNQDEIPPETQSCSLMCPNECVMSEWGLWSKCPQSCDPHTMQRRTRHLLRPSLNSRTCAEDSQVQPCLLNENCFQFQYNLTEWSTCQLSENAPCGQGVRTRLLSCVCSDGKPVSMDQCEQHNLEKPQRMSIPCLVECVVNCQLSGWTAWTECSQTCGHGGRMSRTRFIIMPTQGEGRPCPTELTQEKTCPVTPCYSWVLGNWSACKLEGGDCGEGVQIRSLSCMVHSGSISHAAGRVEDALCGEMPFQDSILKQLCSVPCPGDCHLTEWSEWSTCELTCIDGRSFETVGRQSRSRTFIIQSFENQDSCPQQVLETRPCTGGKCYHYTWKASLWNNNERTVWCQRSDGVNVTGGCSPQARPAAIRQCIPACRKPFSYCTQGGVCGCEKGYTEIMRSNGFLDYCMKVPGSEDKKADVKNLSGKNRPVNSKIHDIFKGWSLQPLDPDGRVKIWVYGVSGGAFLIMIFLIFTSYLVCKKPKPHQSTPPQQKPLTLAYDGDLDM

SEQ ID NO: 1391 - protein, 570 aa, Homo sapiens
DFDLGHIENQGQDWTGPYNWASTMAGTKNKTRAQAKTEKKAAIQAKAGAEREATGVVRPVAKTRAKAKAKTGSKTDAVAEMKAVSKNKVVAETKEGALSEPKTLGKAMGDFTPKAGNESTSSTCKNEAGTDAWFWAGEEATINSWFWNGEEAGNSFSTKNDKPEIGAQVCAEELEPAAGADCKPRSGAEEEEEENVIGNWFWEGDDTSFDPNPKPVSRIVKPQPVYEINEKNRPKDWSEVTIWPNAPAVTPAVLGFRSQAPSEASPPSYIVLASAEENACSLPVATACRPSRNTRSCSQPIPECRFDSDPCIQTIDEIRRQIRIREVNGIKPFACPCKMECYMDSEEFEKLVSLLKSTTDPLIHKIARIAMGVHNVHPFAQEFINEVGVVTLIESLLSFPSPEMRKKTVITLNPPSGDERQRKIELHVKHMCKETMSFPLNSPGQQSGLKILGQLTTDFVHHYIVANYFSELFHLLSSGNCKTRNLVLKLLLNMSENPTAARDMINMKALAALKLIFNQKEAKANLVSGVAIFINIKEHIRKGSIVVVDHLSYNTLMAIFREVKEIIETM

SEQ ID NO: 1392 - protein, 1165 aa, Homo sapiens
EAGSADMSKNIIMPEEEHQQNSEEFQIISGQPSDTLKSRNAADCSILNENTNLDMSKVLCAADSVEVETEEESNFNEDHSFCETFQQAPVKDKVRKPEEMMSLTMSSNYGSPSRFQNENSGSSALNCETAKKNHEISNDAGELRVHCEGEGGNAGDGGGVVPHRHLCPVTLDGERSAESPVLVVTRITREQGNLESGGQNRVARGHGLEDLKGVQEDPVLGNKEILMNSQHETEFILEEDGPASDSTVESSDVYETIISIDDKGQAMYSFGRFDSSIIRIKNPEDGELIDQSEEGLIATGVRISELPLKDCAQGVKKKKSEGSSIGESTRIRCDDCGFLADGLSGLNVHIAMKHPTKEKHFHCLLCGKSFYTESNLHQHLASAGHMRNEQASVEELPEGGATFKCVKCTEPFDSEQNLFLHIKGQHEELLREVNKYIVEDTEQINREREENQGNVCKYCGKMCRSSNSMAFLAHIRTHTGSKPFKCKICHFATAQLGDARNHVKRHLGMREYKCHVCGVAFVMKKHLNTHLLGKHGVGTPKERKFTCHLCDRSFTEKWALNNHMKLHTGEKPFKCTWPTCHYSFLTASAMKDHYRTHTGEKSFLCDLCGFAGGTRHALTKHRRQHTGEKPFKCDECNFASTTQSHLTRHKRVHTGEKPYRCPWCDYRSNCAENIRKHILHTGKHEGVKMYNCPKCDYGTNVPVEFRNHLKEQHPDIENPDLAYLHAGIVSKSYECRLKGQGATFVETDSPFTAAALAEEPLVKEKPLRSSRRPAPPPEQVQQVIIFQGYDGEFALDPSVEETAAATLQTLAMAGQVARVVHITEDGQVIATSQSGAHVGSVVPGPILPEQLADGATQVVVVGGSMEGHGMDESLSPGGAVIQQVTKQEILNLSEAGVAPPEASSALDALLCAVTELGEVEGRAGLEEQGRPGAKDVLIQLPGQEVSHVAADPEAPEIQMFPQAQESPAAVEVLTQVVHPSAAMASQERAQVAFKKMVQGVLQFAVCDTAAAGQLVKDGVTQVVVSEEGAVHMVAGEGAQIIMQEAQGEHMDLVESDGEISQIIVTEELVQAMVQESSGGFSEGTTHYILTELPPGVQDEPGLYSHTVLETADSQELLQAGATLGTEAGAPSRAEQLASVVIYTQEGSSAAAAIQSQRESSELQEA

SEQ ID NO: 1393 - protein, 573 aa, Homo sapiens
SWRTMGSTLGCHRSIPRDPSDLSHSRKFSAACNFSNILVNQERLNINTATEEELMTLPGVTRAVARSIVEYREYIGGFKKVEDLALVSGVGATKLEQVKFEICVSSKGSSAQHSPSSLRRDLLAEQQPHHLATAVPLTPRVNINTATPAQLMSVRGLSEKMALSIVDFRREHGPFRSVEDLVRMDGINAAFLDRIRHQVFAERSRPPSTHTNGGLTFTAKPHPSPTSLSLQSEDLDLPPGGPTQIISTRPSVEAFGGTRDGRPVLRLATWNLQGCSVEKANNPGVREVVCMTLLENSIKLLAVQELLDREALEKFCTELNQPTLPNIRKWKGPRGCWKAVVAEKPSNQLQKGAGYAGFLWDAAAGMELRDAGSQESSPSNGHGKLAGPSPYLGRFKVGSHDLTLVNLHLAALTLLGSENPSKNHSDGHRLASFAQTLQETLKGEKDVIILGDFGQGPDSNDYDILRKEKFHHLIPAHTFTNISTKNPQGSKSLDNIWISKSLKKVFTGHWAVVREGLTNPWIPDNWSWGGVASEHCPVLAEFYTEKDWSKKDAPRNGSGVALERSEANIKHER

SEQ ID NO: 1394 - protein, 896 aa, Homo sapiens
DVSLYKEGNSFGFVLRGGAHEDGHKSRPLVLTYVRPGGPADREGSLKVGDRLLSVDGIPLHGASHATALATLRQCSHEALFQVEYDVATPDTVANASGPLMVEIVKTPGSALGISLTTTSLRNKSVITIDRIKPASVVDRSGALHPGDHILSIDGTSMEHCSLLEATKLLASISEKVRLEILPVPQSQRPLRPSEAVKVQRSEQLHRWDPCVPSCHSPRPGHCRMPTWATPAGQDQSRSLSSTPFSSPTLNHAFSCNNPSTLPRGSQPMSPRTTMGRRRQRRREHKSSLSLASSTVGPGGQIVHTETTEVVLCGDPLSGFGLQLQGGIFATETLSSPPLVCFIEPDSPAERCGLLQVGDRVLSINGIATEDGTMEEANQLLRDAALAHKVVLEVEFDVAESVIPSSGTFHVKLPKKRSVELGITISSASRKRGEPLIISDIKKGSVAHRTGTLEPGDKLLAIDNIRLDNCPMEDAVQILRQCEDLVKLKIRKDEDNSDELETTGAVSYTVELKRYGGPLGITISGTEEPFDPIVISGLTKRGLAERTGAIHVGDRILAINNVSLKGRPLSEAIHLLQVAGETVTLKIKKQLDRPLLPRKSGSLSETSDADEDPADALKGGLPAARFSPAVPSVDSAVESWDSSATEGGFGGPGSYTPQAAARGTTPQERRPGWLRGSPPPTEPRRTSYTPTPADESFPEEEEGDDWEPPTSPAPGPAREEGFWRMFGEALEDLESCGQSELLRELEASIMTGTVQRVALEGRPGHRPWQRGREVRASPAEMEELLLPTPLEMHKVTLHKDPMRHDFGFSVSDGLLEKGVYVHTVRPDGPAHRGGLQPFDRVLQVNHVRTRDFDCCLAVPLLAEAGDVLELIISRKPHTAHSSRAPRSPGPSSPRML

SEQ ID NO: 1395 - protein, 1554 aa, Homo sapiens
NNLSSSSISFTLIWNISLCLLLNYDDMSVAIRKRSWEEHVTHWMGQPFNSDDRNTACHHGLVADSLQASMEKDATLNVDRKEKCVSLPDCCHGSELRDFPGRPMGHLSKDVDENDSHEGEDQFLSLEASTETLVHVSDEDNNADLCLTDDKQVLNTQGQKTSGQHMIQGAGSLEKALPIIQSNQVSSNSWGIAGETELALVKESGERKVTDSISKSLELCNEISLSEIKDAPKVNAVDTLNVKDIAPEKQLLNSAVIAQQRRKPDPPKDENERSTCNVVHDEFLDIPCTNRGLPLLKTDFGSCLLQPPSCPNGMSAENGLEKSGFSQHQNKSPPKVKAEDGMQCLQLKETLATQEPTDNQVRLRKRKEIREDRDRARLDSMVLLIMKLDQLDQDIENALSTSSSPSGTPTNLRRHVPDLESGSESGADTISVNQTRVNLSSDTESTDLPSSTPVANSGTKPKTTAIQGISEKEKAEIEAKEACDWLRATGFPQYAQLYEDFLFPIDISLVKREHDFLDRDAIEALCRRLNTLNKCAVMKLEISPHRKRSDDSDEDEPCAISGKWTFQRDSKRWSRLEEFDVFSPKQDLVPGSPDDSLPKDGPSPGGTLMDLSERQEVSSVRSLSSTGSLPSHAPPSEDAATPRTNSVISVCSSSNLAGNDDSFGSLPSPKELSSFSFSMKGHEKTAKSKTRSLLKRMESLKLKSSHHSKHKAPSKLGLIISGPILQEGMDEEKLKQLNCVEISALNGNRINVPMVRKRSVSNSTQTSSSSSQSETSSAVSTPSPVTRTRSLSACNKRVGMYLEGFDPFNQSTFNNVMEQNFKNRESYPEDTVFYIPEDHKPGTFPKALTNGSFSPSGNNGSVNWRTGSFHGPGHISLRRENSSDSPKELKRRNSSSSMSSRLSIYDNVPGSILYSSSGDLADLENEDIFPELDDILYHVKGMQRIVNQWSEKFSDEGDSDSALDSVSPCPSSPKQIHLDVDNDRTTPSDLDSTGNSLNEPEEPSEIPERRDSGVGASLTRSNRHRLRWHSFQSSHRPSLNSVSLQINCQSVAQMNLLQKYSLLKLTALLEKYTPSNKHGFSWAVPKFMKRIKVPDYKDRSVFGVPLTVNVQRTGQPLPQSIQQAMRYLRNHCLDQVGLFRKSGVKSRIQALRQMNEGAIDCVNYEGQSAYDVADMLKQYFRDLPEPLMTNKLSETFLQIYQYVPKDQRLQAIKAAIMLLPDENREVLQTLLYFLSDVTAAVKENQMTPTNLAVCLAPSLFHLNTLKRENSSPRVMQRKQSLGKPDQKDLNENLAATQGLAHMIAECKKLFQVPEEMSRCRNSYTEQELKPLTLEALGHLGNDDSADYQHFLQDCVDGLFKEVKEKFKGWVSYSTSEQAELSYKKVSEGPPLRLWRSVIEVPAVPEEILKRLLKEQHLWDVDLLDSKVIEILDSQTEIYQYVQNSMAPHPARDYVVLRTWRTNLPKGACALLLTSVDHDRAPVVGVRVNVLLSRYLIEPCGPGKSKLTYMCRVDLRGHMPEWYTKSFGHLCAAEVVKIRDSFSNQNTETKDTKSR

SEQ ID NO: 1396 - protein, 1042 aa, Homo sapiens
KKHGSKCLVHCKMGVSRSASTVIAYAMKEYGWNLDRAYDYVKERRTVTKPNPSFMRQLEEYQGILLASKQRHNKLWRSHSDSDLSDHHEPICKPGLELNKKDITTSADQIAEVKTMESHPPIPPVFVEHMVPQDANQKGLCTKERMICLEFTSREFHAGQIEDELNLNDINGCSSGCCLNESKFPLDNCHASKALIQPGHVPEMANKFPDLTVEDLETDALKADMNVHLLPMEELTSPLKDPPMSPDPESPSPQPSCQTEISDFSTDRIDFFSALEKFVELSQETRSRSFSHSRMEELGGGRNESCRLSVVEVAPSKVTADDQRSSSLSNTPHASEESSMDEEQSKAISELVSPDIFMQSHSENAISVKEIVTEIESISQGVGQIQLKGDILPNPCHTPKKNSIHELLLERAQTPENKPGHMEQDEDSCTAQPELAKDSGMCNPEGCLTTHSSIADLEEGEPAEGEQELQGSGMHPGAKWYPGSVRRATLEFEERLRQEQEHHGAAPTCTSLSTRKNSKNDSSVADLAPKGKSDEAPPEHSFVLKEPEMSKGKGKYSGSEAGSLSHSEQNATVPAPRVLEFDHLPDPQEGPGSDTGTQQEGVLKDLRTVIPYQESETQAVPLPLPKRVEIIEYTHIVTSPNHTGPGSEIATSEKSGEQGLRKVNMEKSVTVLCTLDENLNRTLDPNQVSLHPQVLPLPHSSSPEHNRPTDHPTSILSSPEDRGSSLSTALETAAPFVSHTTHLLSASLDYLHPQTMVHLEGFTEQSSTTDEPSAEQVSWEESQESPLSSGSEVPYKDSQLSSADLSLISKLGDNTGELQEKMDPLPVACRLPHSSSSENIKSLSHSPGVVKERAKEIESRVVFQAGLTKPSQMRRSASLAKLGYLDLCKDCLPEREPASCESPHLKLLQPFLRTDSGMHAMEDQESLENPGAPHNPEPTKSFVEQLTTTECIVQSKPVERPLVQYAKEFGSSQQYLLPRAGLELTSSEGGLPVLQTQGLQCACPAPGLAVAPRQQHGRTHPLRRLKKANDKKRTTNPFYNTM

SEQ ID NO: 1397 - protein, 1098 aa, Homo sapiens
YTPVMAARQAVGSGAQETCGLDRILEALKLLLSPGGSGSSSLQVTKHDVLLATLKSNLSALEDKFLKDPQWKNLKLLRDEIADKAEWPQNSVDVTWSFTSQTLLLLLCLKETMIRLAANFNPGKPNPRTPEVAPALSPDALSISQQKTVQFVLQFVVTLGICPYLMPGVGVPLRYRTEFGAVVQDVVCFDAAPDATRRLYTSCKALLNVAQHTSLGSLIFCHHFGDIAAGLCQLGFCPTKRKLLTPAEEVLTEEERTLSRGALRDMLDQVYQPLAVRELLILQGGPPQSCTDVKTQMRCRAPAWLRRLCGQLLSERLMRPNGVQAVVRGILEGAGAGAAGGSDAEVTAADWKKCDLIAKILASCPQQSLSPENYYRDICPQVLDLFHFQDKLTARQFQRVATTTFITLSRERPHLAAKYLLQPVLAPLHRCLNTAELSESDMVPGTILVTEEELSRCIEDVFKVYVVGNEPLTVLMDSLLPVLGVLFLLYCFTKQSVSHIRSLCQEILLWILGKLERKKAIASLKGFAGLDKAVPSLHSLCQFRVATQGGIMITIKEAISDEDEDEALYQKVSSEQGRVEHLGDLLSHCQECGLAGDFFIFCLKELTHVASENETELKTEPFSSKSLLELEQHQTLLVEGQERKLLVLQLMAVLCERMSEQIFTNVTQVVDFVAATLQRACASLAHQAESTVESQTLSMSMGLVAVMLGGAVQLKSSDFAVLKQLLPLLEKVSNTYPDPVIQELAVDLRITISTHGAFATEAVSMAAQSTLNRKDLEGKIEEQQQTSHERPTDVAHSHLEQQQSHETAPQTGLQSNAPIIPQGVNEPSTTTSQKSGSVTTEQLQEVLLSAYDPQIPTRAAALRTLSHWIEQREAKALEMQEKLLKIFLENLEHEDTFVYLSAIQGVALLSDVYPEKILPDLLAQYDSSKDKHTPETRMKVGEVLMRIVRALGDMVSKYREPLIHTFLRGVRDPDGAHRASSLANLGELCQRLDFLLGSVVHEVTACLIAVAKTDGEVQVRRAAIHVVVLLLRGLSQKATEVLSAVLKDLYHLLKHVVCLEPDDVAKLHAQLALEELDDIMKNFLFPPQKLEKKIMVLP

SEQ ID NO: 1398 - protein, 360 aa, Homo sapiens
RWHLGKTIEKLQKEMADIVEASRTSTLELQNQLDEYKEKNRRELAEMQRQLKEKTLEAEKSRLTAMKMQDEMRLMEEELRDYQRAQDEALTKRQLLEQTLKDLEYELEAKSHLKDDRSRLVKQMEDKVSQLEMELEEERNNSDLLSERISRSREQMEQVRNELLQERAARQDLECDKISLERQNKDLKSRIIHLEGSYRSSKEGLVVQMEARIAELEDRLESEERDRANLQLSNRRLERKVKELVMQVDDEHLSLTDQKDQLSLRLKAMKRQVEEAEEEIDRLESSKKKLQRELEEQMDMNEHLQGQLNSMKKDLRLKKLPSKVLDDMDDDDDLSTDGGSLYEAPVSYTFSKDSTVASQI

SEQ ID NO: 1399 - protein, 1001 aa, Homo sapiens
QRKLEQHKDLLQNTDAHKRAFHEIYRTRSVNGIPVPPDQLEDMAERFHFVSSTSELHLMKMEFLELKYRLLSLLVLAESKLKSWIIKYGRRESVEQLLQNYVSFIENSKFFEQYEVTYQILKQTAEMYVKADGSVEEAENVMKFMNETTAQWRNLSVEVRSVRSMLEEVISNWDRYGNTVASLQAWLEDAEKMLNQSENAKKDFFRNLPHWIQQHTAMNDAGNFLIETCDEMVSRDLKQQLLLLNGRWRELFMEVKQYAQADEMDRMKKEYTDCVVTLSAFATEAHKKLSEPLEVSFMNVKLLIQDLEDIEQRVPVMDAQYKIITKTAHLITKESPQEEGKEMFATMSKLKEQLTKVKECYSPLLYESQQLLIPLEELEKQMTSFYDSLGKINEIITVLEREAQSSALFKQKHQELLACQENCKKTLTLIEKGSQSVQKFVTLSNVLKHFDQTRLQRQIADIHVAFQSMVKKTGDWKKHVETNSRLMKKFEESRAELEKVLRIAQEGLEEKGDPEELLRRHTEFFSQLDQRVLNAFLKACDELTDILPEQEQQGLQEAVRKLHKQWKDLQGEAPYHLLHLKIDVEKNRFLASVEECRTELDRETKLMPQEGSEKIIKEHRVFFSDKGPHHLCEKRLQLIEELCVKLPVRDPVRDTPGTCHVTLKELRAAIDSTYRKLMEDPDKWKDYTSRFSEFSSWISTNETQLKGIKGEAIDTANHGEVKRAVEEIRNGVTKRGETLSWLKSRLKVLTEVSSENEAQKQGDELAKLSSSFKALVTLLSEVEKMLSNFGDCVQYKEIVKNSLEELISGSKEVQEQAEKILDTENLFEAQQLLLHHQQKTKRISAKKRDVQQQIAQAQQGEGGLPDRGHEELRKLESTLDGLERSRERQERRIQVTLRKWERFETNKETVVRYLFQTGSSHERFLSFSSLESLSSELEQTKEFSKRTESIAVQAENLVKEASEIPLGPQNKQLLQQQAKSIKEQVKKLEDTLEEEYVIDKS

SEQ ID NO: 1400 - protein, 1460 aa, Homo sapiens
DKPSGSPGQPPSPAPSPVPEPDAQAEDVAPPPTMAEEEEGTTGELRSAEPAPADSRHPLTYRKTTNFALDKFLDPARPYKCTVCKESFTQKNILLVHYNSVSHLHKMKKAAIDPSAPARGEAGAPPTTTAATDKPFKCTVCRVSYNQSSTLEIHMRSVLHQTRSRGTKTDSKIEGPERSQEEPKEGETEGEVGTEKKGPDTSGFISGLPFLSPPPPPLDLHRFPAPLFTPPVLPPFPLVPESLLKLQQQQLLLPFYLHDLKVGPKLTLAGPAPVLSLPAATPPPPPQPPKAELAEREWERPPMAKEGNEAGPSSPPDPLPNEAARTAAKALLENFGFELVIQYNEGKQAVPPPPTPPPPEALGGGDKLACGACGKLFSNMLILKTHEEHVHRRFLPFEALSRYAAQFRKSYDSLYPPLAEPPKPPDGSLDSPVPHLGPPFLVPEPEAGGTRAPEERSRAGGHWPIEEEESSRGNLPPLVPAGRRFSRTKFTEFQTQALQSFFETSAYPKDGEVERLASLLGLASRVVVVWFQNARQKARKNACEGGSMPTGGGTGGASGCRRCHATFSCVFELVRHLKKCYDDQTLEEEEEEAERGEEEEEVEEEEVEEEQGLEPPAGPEGPLPEPPDGEELSQAEATKAGGKEPEEKATPSPSPAHTCDQCAISFSSQDLLTSHRRLHFLPSLQPSAPPQLLDLPLLVFGERNPLVAATSPMPGPPLKRKHEDGSLSPTGSEAGGGGEGEPPRDKRLRTTILPEQLEILYRWYMQDSNPTRKMLDCISEEVGLKKRVVQVWFQNTRARERKGQFRSTPGGVPSPAVKPPATATPASLPKFNLLLGKVDDGTGREAPKREAPAFPYPTATLASGPQPFLPPGKEATTPTPEPPLPLLPPPPPSEEEGPEEPPKASPESEACSLSAGDLSDSSASSLAEPESPGAGGTSGGPGGGTGVPDGMGQRRYRTQMSSLQLKIMKACYEAYRTPTMQECEVLGEEIGLPKRVIQVWFQNARAKEKKAKLQGTAAGSTGGSSEGLLAAQRTDCPYCDVKYDFYVSCRGHLFSRQHLAKLKEAVRAQLKSESKCYDLAPAPEAPPALKAPPATTPASMPLGAAPTLPRLAPVLLSGPALAQPPLGNLAPFNSGPAASSGLLGLATSVLPTTTVVQTAGPGRPLPQRPMPDQTNTSTAGTTDPVPGPPTEPLGDKVSSERKPVAGPTSSSNDALKNLKALKTTVPALLGGQFLPFPLPPAGGTAPPAVFGPQLQGAYFQQLYGMKKGLFPMNPMIPQTLIGLLPNALLQPPPQPPEPTATAPPKPPELPAPGEGEAGEVDELLTGSTGISTVDVTHRYLCRQCKMAFDGEAPATAHQRSFCFFGRGSGGSMPPPLRVPICTYHCLACEVLLSGREALASHLRSSAHRRKAAPPQGGPPISITNAATAASAAVAFAKEEARLPHTDSNPKTTTTSTLLAL

SEQ ID NO: 1401 - protein, 608 aa, Homo sapiens
SRLFSKALKGDHRCGETETPKSCSEVAGCKAAMRHQGKIPEELSLDDRARTQKKWGRGKWEPEPSSKPPREATLEERHARGEKHLGVEIEKTSGEIIRCEKCKRERELQQSLERERLSLGTSELDMGKGPMYDVEKLVRTRSCRRSPEANPASGEEGWKGDSHRSSPRNPTQELRRPSKSMDKKEDRGPEDQESHAQGAAKAKKDLVEVLPVTEEGLREVKKDTRPMSRSKHGGWLLREHQAGFEKLRRTRGEEKEAEKEKKPCMSGGRRMTLRDDQPAKLEKEPKTRPEENKPERPSGRKPRPMGIIAANVEKHYETGRVIGDGNFAVVKECRHRETRQAYAMKIIDKSRLKGKEDMVDSEILIIQSLSHPNIVKLHEVYETDMEIYLILEYVQGGDLFDAIIESVKFPEPDAALMIMDLCKALVHMHDKSIVHRDLKPENLLVQRNEDKSTTLKLADFGLAKHVVRPIFTVCGTPTYVAPEILSEKGYGLEVDMWAAGVILYILLCGFPPFRSPERDQDELFNIIQLGHFEFLPPYWDNISDAAKDLVSRLLVVDPKKRYTAHQVLQHPWIETAGKTNTVKRQKQVSPSSEGHFRSQHKRVVEQVS

SEQ ID NO: 1402 - protein, 258 aa, Homo sapiens
  VARIANT 10, 258: Xaa = Any Amino Acid
DYLNGPFTVXVKESCDGMGDVSEKHGSGPVVPEKAVRFSFTIMKITIAHSSQNVKVFEEAKPNSELCCKPLCLMLADESDHETLTAILSPLIAEREAMKSSELMLELGGILRTFKFIFRGTGYDEKLVREVEGLEASGSVYICTLCDATRLEASQNLVFHSITRSHAENLERYEVWRSNPYHESVEELRDRVKGVSAKPFIETVPSIDALHCDIGNAAEFYKIFQLEIGEVYKNPNASKEERKRWQATLDKHLRKKMX

SEQ ID NO: 1403 - protein, 290 aa, Homo sapiens
MAALRVLLSCARGPLRPPVRCPAWRPFASGANFEYIIAEKRGKNNTVGLIQLNRPKALNALCDGLIDELNQALKIFEEDPAVGAIVLTGGDKAFAAGADIKEMQNLSFQDCYSSKFLKHWDHLTQVKKPVIAAVNGYAFGGGCELAMMCDIIYAGEKAQFAQPEILIGTIPGAGGTQRLTRAVGKSLAMEMVLTGDRISAQDAKQAGLVSKICPVETLVEEAIQCAEKIASNSKIVVAMAKESVNAAFEMTLTEGSKLEKKLFYSTFATDDRKEGMTAFVEKRKANFKDQ

SEQ ID NO: 1404 - protein, 2382 aa, Homo sapiens
MSGGAAEKQSSTPGSLFLSPPAPAPKNGSSSDSSVGEKLGAAAADAVTGRTEEYRRRRHTMDKDSRGAAATTTTTEHRFFRRSVICDSNATALELPGLPLSLPQPSIPAAVPQSAPPEPHREETVTATATSQVAQQPPAAAAPGEQAVAGPAPSTVPSSTSKDRPVSQPSLVGSKEEPPPARSGSGGGSAKEPQEERSQQQDDIEELETKAVGMSNDGRFLKFDIEIGRGSFKTVYKGLDTETTVEVAWCELQDRKLTKSERQRFKEEAEMLKGLQHPNIVRFYDSWESTVKGKKCIVLVTELMTSGTLKTYLKRFKVMKIKVLRSWCRQILKGLQFLHTRTPPIIHRDLKCDNIFITGPTGSVKIGDLGLATLKRASFAKSVIGTPEFMAPEMYEEKYDESVDVYAFGMCMLEMATSEYPYSECQNAAQIYRRVTSGVKPASFDKVAIPEVKEIIEGCIRQNKDERYSIKDLLNHAFFQEETGVRVELAEEDDGEKIAIKLWLRIEDIKKLKGKYKDNEAIEFSFDLERDVPEDVAQEMVESGYVCEGDHKTMAKAIKDRVSLIKRKREQRQLVREEQEKKKQEESSLKQQVEQSSASQTGIKQLPSASTGIPTASTTSASVSTQVEPEEPEADQHQQLQYQQPSISVLSDGTVDSGQGSSVFTESRVSSQQTVSYGSQHEQAHSTGTVPGHIPSTVQAQSQPHGVYPPSSVAQGQSQGQPSSSSLTGVSSSQPIQHPQQQQGIQQTAPPQQTVQYSLSQTSTSSEATTAQPVSQPQAPQVLPQVSAGKQLPVSQPVPTIQGEPQIPVATQPSVVPVHSGAHFLPVGQPLPTPLLPQYPVSQIPISTPHVSTAQTGFSSLPITMAAGITQPLLTLASSATTAAIPGVSTVVPSQLPTLLQPVTQLPSQVHPQLLQPAVQSMGIPANLGQAAEVPLSSGDVLYQGFPPRLPPQYPGDSNIAPSSNVASVCIHSTVLSPPMPTEVLATPGYFPTVVQPYVESNLLVPMGGVGGQVQVSQPGGSLAQAPTTSSQQAVLESTQGVSQVAPAEPVAVAQPQATQPTTLASSVDSAHSDVASGMSDGNENVPSSSGRHEGRTTKRHYRKSVRSRSRHEKTSRPKLRILNVSNKGDRVVECQLETHNRKMVTFKFDLDGDNPEEIATIMVNNDFILAIERESFVDQVREIIEKADEMLSEDVSVEPEGDQGLESLQGKDDYGFSGSQKLEGEFKQPIPASSMPQQIGIPTSSLTQVVHSAGRRFIVSPVPESRLRESKVFPSEITDTVAASTAQSPGMNLSHSASSLSLQQAFSELRRAQMTEGPNTAPPNFSHTGPTFPVVPPFLSSIAGVPTTAAATAPVPATSSPPNDISTSVIQSEVTVPTEEGIAGVATSTGVVTSGGLPIPPVSESPVLSSVVSSITIPAVVSISTTSPSLQVPTSTSEIVVSSTALYPSVTVSATSASAGGSTATPGPKPPAVVSQQAAGSTTVGATLTSVSTTTSFPSTASQLSIQLSSSTSTPTLAETVVVSAHSLDKTSHSSTTGLAFSLSAPSSSSSPGAGVSSYISQPGGLHPLVIPSVIASTPILPQAAGPTSTPLLPQVPSIPPLVQPVANVPAVQQTLIHSQPQPALLPNQPHTHCPEVDSDTQPKAPGIDDIKTLEEKLRSLFSEHSSSGAQHASVSLETSLVIESTVTPGIPTTAVAPSKLLTSTTSTCLPPTNLPLGTVALPVTPVVTPGQVSTPVSTTTSGVKPGTAPSKPPLTKAPVLPVGTELPAGTLPSEQLPPFPGPSLTQSQQPLEDLDAQLRRTLSPEIITVTSAVGPVSMAAPTAITEAGTQPQKGVSQVKEGPVLATSSGAGVFKMGRFQVSVAADGAQKEGKNKSEDAKSVHFESSTSESSVLSSSSPESTLVKPEPNGITIPGISSDVPESAHKTTASEAKSDTGQPTKVGRFQVTTTANKVGRFSVSKTEDKITDTKKEGPVASPPFMDLEQAVLPAVIPKKEKPELSEPSHLNGPSSDPEAAFLSRDVDDGSGSPHSPHQLSSKSLPSQNLSQSLSNSFNSSYMSSDNESDIEDEDLKLELRRLRDKHLKEIQDLQSRQKHEIESLYTKLGKVPPAVIIPPAAPLSGRRRRPTKSKGSKSSRSSSLGNKSPQLSGNLSGQSAASVLHPQQTLHPPGNIPESGQNQLLQPLKPSPSSDNLYSAFTSDGAISVPSLSAPGQGTSSTNTVGATVNSQAAQAQPPAMTSSRKGTFTDDLHKLVDNWARDAMNLSGRRGSKGHMNYEGPGMARKFSAPGQLCISMTSNLGGSAPISAASATSLGHFTKSMCPPQQYGFPATPFGAQWSGTGGPAPQPLGQFQPVGTASLQNFNISNLQKSISNPPGSNLRTT

SEQ ID NO: 1405 - protein, 335 aa, Homo sapiens
MAGSPTCLTLIYILWQLTGSAASGPVKELVGSVGGAVTFPLKSKVKQVDSIVWTFNTTPLVTIQPEGGTIIVTQNRNRERVDFPDGGYSLKLSKLKKNDSGIYYVGIYSSSLQQPSTQEYVLHVYEHLSKPKVTLGLQSNKNGTCVTNLTCCMEHGEEDVIYTWKALGQAANESHNGSILPISWRWGESDMTFICVARNPVSRNFSSPILARKLCEGAADDPDSSMVLLCLLLVPLLLSLFVLGLFLWFLKRERQEEYIEEKKRVDICRETPNICPHSGENTEYDTIPHTNRTILKEDPANTVYSTVEIPKKMENPHSLLTMPDTPRLFAYENVI

SEQ ID NO: 1406 - protein, 470 aa, Homo sapiens
MKEEKEHRPKEKRVTLLTPAGATGSGGGTSGDSSKGEDKQDRNKEKKEALSKVVIRRLPPTLTKEQLQEHLQPMPEHDYFEFFSNDTSLYPHMYARAYINFKNQEDIILFRDRFDGYVFLDNKGQEYPAIVEFAPFQKAAKKKTKKRDTKVGTIDDDPEYRKFLESYATDNEKMTSTPETLLEEIEAKNRELIAKKTTPLLSFLKNKQRMREEKREERRRREIERKRQREEERRKWKEEEKRKRKDIEKLKKIDRIPERDKLKDEPKIKLLKKPEKGDEKELDKREKAKKLDKENLSDERASGQSCTLPKRSDSELKDEKPKRPEDESGRDYREREREYERDQERILRERERLKRQEEERRRQKERYEKEKTFKRKEEEMKKEKDTLRDKGKKAESTESIGSSEKTEKKEEVVKRDRIRNKDRPAMQLYQPGARSRNRLCPPDDSTKSGDSAAERKQESGISHRKEGGEE

SEQ ID NO: 1407 - protein, 1014 aa, Homo sapiens
MAESSDKLYRVEYAKSGRASCKKCSESIPKDSLRMAIMVQSPMFDGKVPHWYHFSCFWKVGHSIRHPDVEVDGFSELRWDDQQKVKKTAEAGGVTGKGQDGIGSKAEKTLGDFAAEYAKSNRSTCKGCMEKIEKGQVRLSKKMVDPEKPQLGMIDRWYHPGCFVKNREELGFRPEYSASQLKGFSLLATEDKEALKKQLPGVKSEGKRKGDEVDGVDEVAKKKSKKEKDKDSKLEKALKAQNDLIWNIKDELKKVCSTNDLKELLIFNKQQVPSGESAILDRVADGMVFGALLPCEECSGQLVFKSDAYYCTGDVTAWTKCMVKTQTPNRKEWVTPKEFREISYLKKLKVKKQDRIFPPETSASVAATPPPSTASAPAAVNSSASADKPLSNMKILTLGKLSRNKDEVKAMIEKLGGKLTGTANKASLCISTKKEVEKMNKKMEEVKEANIRVVSEDFLQDVSASTKSLQELFLAHILSPWGAEVKAEPVEVVAPRGKSGAALSKKSKGQVKEEGINKSEKRMKLTLKGGAAVDPDSGLEHSAHVLEKGGKVFSATLGLVDIVKGTNSYYKLQLLEDDKENRYWIFRSWGRVGTVIGSNKLEQMPSKEDAIEHFMKLYEEKTGNAWHSKNFTKYPKKFYPLEIDYGQDEEAVKKLTVNPGTKSKLPKPVQDLIKMIFDVESMKKAMVEYEIDLQKMPLGKLSKRQIQAAYSILSEVQQAVSQGSSDSQILDLSNRFYTLIPHDFGMKKPPLLNNADSVQAKVEMLDNLLDIEVAYSLLRGGSDDSSKDPIDVNYEKLKTDIKVVDRDSEEAEIIRKYVKNTHATTHNAYDLEVIDIFKIEREGECQRYKPFKQLHNRRLLWHGSRTTNFAGILSQGLRIAPPEAPVTGYMFGKGIYFADMVSKSANYCHTSQGDPIGLILLGEVALGNMYELKHASHISKLPKGKHSVKGLGKTTPDPSANISLDGVDVPLGTGISSGVNDTSLLYNEYIVYDIAQVNLKYLLKLKFNFKTSLW

SEQ ID NO: 1408 - protein, 1224 aa, Homo sapiens
MEPLLLGRGLIVYLMFLLLKFSKAIEIPSSVQQVPTIIKQSKVQVAFPFDEYFQIECEAKGNPEPTFSWTKDGNPFYFTDHRIIPSNNSGTFRIPNEGHISHFQGKYRCFASNKLGIAMSEEIEFIVPSVPKFPKEKIDPLEVEEGDPIVLPCNPPKGLPPLHIYWMNIELEHIEQDERVYMSQKGDLYFANVEEKDSRNDYCCFAAFPRLRTIVQKMPMKLTVNSLKHANDSSSSTEIGSKANSIKQRKPKLLLPPTESGSESSITILKGEILLLECFAEGLPTPQVDWNKIGGDLPKGRETKENYGKTLKIENVSYQDKGNYRCTASNFLGTATHDFHVIVEEPPRWTKKPQSAVYSTGSNGILLCEAEGEPQPTIKWRVNGSPVDNHPFAGDVVFPREISFTNLQPNHTAVYQCEASNVHGTILANANIDVVDVRPLIQTKDGENYATVVGYSAFLHCEFFASPEAVVSWQKVEEVKPLEGRRYHIYENGTLQINRTTEEDAGSYSCWVENAIGKTAVTANLDIRNATKLRVSPKNPRIPKLHMLELHCESKCDSHLKHSLKLSWSKDGEAFEINGTEDGRIIIDGANLTISNVTLEDQGIYCCSAHTALDSAADITQVTVLDVPDPPENLHLSERQNRSVRLTWEAGADHNSNISEYIVEFEGNKEEPGRWEELTRVQGKKTTVILPLAPFVRYQFRVIAVNEVGRSQPSQPSDHHETPPAAPDRNPQNIRVQASQPKEMIIKWEPLKSMEQNGPGLEYRVTWKPQGAPVEWEEETVTNHTLRVMTPAVYAPYDVKVQAINQLGSGPDPQSVTLYSGEDYPDTAPVIHGVDVINSTLVKVTWSTVPKDRVHGRLKGYQINWWKTKSLLDGRTHPKEVNILRFSGQRNSGMVPSLDAFSEFHLTVLAYNSKGAGPESEPYIFQTPEGVPEQPTFLKVIKVDKDTATLSWGLPKKLNGNLTGYLLQYQIINDTYEIGELNDINITTPSKPSWHLSNLNATTKYKFYLRACTSQGCGKPITEESSTLGEGSKGIGKISGVNLTQKTHPIEVFEPGAEHIVRLMTKNWGDNDSIFQDVIETRGREYAGLYDDISTQGWFIGLMCAIALLTLLLLTVCFVKRNRGGKYSVKEKEDLHPDPEIQSVKDETFGEYSDSDEKPLKGSLRSLNRDMQPTESADSLVEYGEGDHGLFSEDGSFIGAYAGSKEKGSVESNGSSTATFPLRA

SEQ ID NO: 1409 - protein, 481 aa, Homo sapiens
MDDFERRRELRRQKREEMRLEAERIAYQRNDDDEEEAARERRRRARQERLRQKQEEESLGQVTDQVEVNAQNSVPDEEAKTTTTNTQVEGDDEAAFLERLARREERRQKRLQEALERQKEFDPTITDASLSLPSRRMQNDTAENETTEKEEKSESRQERYEIEETETVTKSYQKNDWRDAEENKKEDKEKEEEEEEKPKRGSIGENQIKDEKIKKDKEPKEEVKSFMDRKKGFTEVKSQNGEFMTHKLKHTENTFSRPGGRASVDTKEAEGAPQVEAGKRLEELRRRRGETESEEFEKLKQKQQEAALELEELKKKREERRKVLEEEEQRRKQEEADRKLREEEEKRRLKEEIERRRAEAAEKRQKMPEDGLSDDKKPFKCFTPKGSSLKIEERAEFLNKSVQKSSGVKSTHQAAIVSKIDSRLEQYTSAIEGTKSAKPTKPAASDLPVPAEGVRNIKSMWEKGNVFSSPTAAGTPNKVSI

SEQ ID NO: 1410 - protein, 567 aa, Homo sapiens
MLERRCRGPLAMGLAQPRLLSGPSQESPQTLGKESRGLRQQGTSVAQSGAQAPGRAHRCAHCRRHFPGWVALWLHTRRCQARLPLPCPECGRRFRHAPFLALHRQVHAAATPDLGFACHLCGQSFRGWVALVLHLRAHSAAKRPIACPKCERRFWRRKQLRAHLRRCHPPAPEARPFICGNCGRSFAQWDQLVAHKRVHVAEALEEAAAKALGPRPRGRPAVTAPRPGGDAVDRPFQCACCGKRFRHKPNLIAHRRVHTGERPHQCPECGKRFTNKPYLTSHRRIHTGEKPYPCKECGRRFRHKPNLLSHSKIHKRSEGSAQAAPGPGSPQLPAGPQESAAEPTPAVPLKPAQEPPPGAPPEHPQDPIEAPPSLYSCDDCGRSFRLERFLRAHQRQHTGERPFTCAECGKNFGKKTHLVAHSRVHSGERPFACEECGRRFSQGSHLAAHRRDHAPDRPFVCPDCGKAFRHKPYLAAHRRIHTGEKPYVCPDCGKAFSQKSNLVSHRRIHTGERPYACPDCDRSFSQKSNLITHRKSHIRDGAFCCAICGQTFDDEERLLAHQKKHDV

SEQ ID NO: 1411 - protein, 316 aa, Homo sapiens
MGNRHAKASSPQGFDVDRDAKKLNKACKGMGTNEAAIIEILSGRTSDERQQIKQKYKATYGKELEEVLKSELSGNFEKTALALLDRPSEYAARQLQKAMKGLGTDESVLIEVLCTRTNKEIIAIKEAYQRLFDRSLESDVKGDTSGNLKKILVSLLQANRNEGDDVDKDLAGQDAKDLYDAGEGRWGTDELAFNEVLAKRSYKQLRATFQAYQILIGKDIEEAIEEETSGDLQKAYLTLVRSAQDCEDYFAERLYKSMKGAGTDEETLIRIIVTRAEVDLQGIKAKFQKKYQKSLSDMVRSDTSGDFRKLLVALLH

SEQ ID NO: 1412 - protein, 522 aa, Homo sapiens
MASSRASSTQATKTKAPDDLVAPVVKKPHIYYGSLEEKERERLAKGESGILGKDGLKAGIEAGNINITSGEVFEIEEHISERQAEVLAEFERRKRARQINVSTDDSEVKACLRALGEPITLFGEGPAERRERLRNILSVVGTDALKKTKKDDEKSKKSKEEYQQTWYHEGPNSLKVARLWIANYSLPRAMKRLEEARLHKEIPETTRTSQMQELHKSLRSLNNFCSQIGDDRPISYCHFSPNSKMLATACWSGLCKLWSVPDCNLLHTLRGHNTNVGAIVFHPKSTVSLDPKDVNLASCAADGSVKLWSLDSDEPVADIEGHTVRVARVMWHPSGRFLGTTCYDRSWRLWDLEAQEEILHQEGHSMGVYDIAFHQDGSLAGTGGLDAFGRVWDLRTGRCIMFLEGHLKEIYGINFSPNGYHIATGSGDNTCKVWDLRQRRCVYTIPAHQNLVTGVKFEPIHGNFLLTGAYDNTAKIWTHPGWSPLKTLAGHEGKVMGLDISSDGQLIATCSYDRTFKLWMAE

SEQ ID NO: 1413 - protein, 361 aa, Homo sapiens
MASLLAKDAYLQSLAKKICSHSAPEQQARTRAGKTQGSETAGPPKKKRKKTQKKFRKREEKAAEHKAKSLGEKSPAASGARRPEAAKEEAAWASSSAGNPADGLATEPESVFALDVLRQRLHEKIQEARGQGSAKELSPAALEKRRRRKQERDRKKRKRKELRAKEKARKAEEATEAQEVVEATPEGACTEPREPPGLIFNKVEVSEDEPASKAQRRKEKRQRVKGNLTPLTGRNYRQLLERLQARQSRLDELRGQDEGKAQELEAKMKWTNLLYKAEGVKIRDDERLLQEALKRKEKRRAQRQRRWEKRTAGVVEKMQQRQDRRRQNLRRKKAARAERRLLRARKKGRILPQDLERAGLV

SEQ ID NO: 1414 - protein, 227 aa, Homo sapiens
MGASARLLRAVIMGAPGSGKGTVSSRITTHFELKHLSSGDLLRDNMLRGTEIGVLAKAFIDQGKLIPDDVMTRLALHELKNLTQYSWLLDGFPRTLPQAEALDRAYQIDTVINLNVPFEVIKQRLTARWIHPASGRVYNIEFNPPKTVGIDDLTGEPLIQREDDKPETVIKRLKAYEDQTKPVLEYYQKKGVLETFSGTETNKIWPYVYAFLQTKVPQRSQKASVTP

SEQ ID NO: 1415 - protein, 335 aa, Homo sapiens
MAAGAAEAAVAAVEEVGSAGQFEELLRLKAKSLLVVHFWAPWAPQCAQMNEVMAELAKELPQVSFVKLEAEGVPEVSEKYEISSVPTFLFFKNSQKIDRLDGAHAPELTKKVQRHASSGSFLPSANEHLKEDLNLRLKKLTHAAPCMLFMKGTPQEPRCGFSKQMVEILHKHNIQFSSFDIFSDEEVRQGLKAYSSWPTYPQLYVSGELIGGLDIIKELEASEELDTICPKAPKLEERLKVLTNKASVMLFMKGNKQEAKCGFSKQILEILNSTGVEYETFDILEDEEVRQGLKAYSNWPTYPQLYVKGELVGGLDIVKELKENGELLPILRGEN

SEQ ID NO: 1416 - protein, 1012 aa, Homo sapiens
MPASAPPRRPRPPPPSLSLLLVLLGLGGRRLRAEPGDGAQTWARFSRPPAPEAAGLFQGTFPDGFLWAVGSAAYQTEGGWQQHGKGASIWDTFTHHPLAPPGDSRNASLPLGAPSPLQPATGDVASDSYNNVFRDTEALRELGVTHYRFSISWARVLPNGSAGVPNREGLRYYRRLLERLRELGVQPVVTLYHWDLPQRLQDAYGGWANRALADHFRDYAELCFRHFGGQVKYWITIDNPYVVAWHGYATGRLAPGIRGSPRLGYLVAHNLLLAHAKVWHLYNTSFRPTQGGQVSIALSSHWINPRRMTDHSIKECQKSLDFVLGWFAKPVFIDGDYPESMKNNLSSILPDFTESEKKFIKGTADFFALCFGPTLSFQLLDPHMKFRQLESPNLRQLLSWIDLEFNHPQIFIVENGWFVSGTTKRDDAKYMYYLKKFIMETLKAIKLDGVDVIGYTAWSLMDGFEWHRGYSIRRGLFYVDFLSQDKMLLPKSSALFYQKLIEKNGFPPLPENQPLEGTFPCDFAWGVVDNYIQVDTTLSQFTDLNVYLWDVHHSKRLIKVDGVVTKKRKSYCVDFAAIQPQIALLQEMHVTHFRFSLDWALILPLGNQSQVNHTILQYYRCMASELVRVNITPVVALWQPMAPNQGLPRLLARQGAWENPYTALAFAEYARLCFQELGHHVKLWITMNEPYTRNMTYSAGHNLLKAHALAWHVYNEKFRHAQNGKISIALQADWIEPACPFSQKDKEVAERVLEFDIGWLAEPIFGSGDYPWVMRDWLNQRNNFLLPYFTEDEKKLIQGTFDFLALSHYTTILVDSEKEDPIKYNDYLEVQEMTDITWLNSPSQVAVVPWGLRKVLNWLKFKYGDLPMYIISNGIDDGLHAEDDQLRVYYMQNYINEALKAHILDGINLCGYFAYSFNDRTAPRFGLYRYAADQFEPKASMKHYRKIIDSNGFPGPETLERFCPEEFTVCTECSFFHTRKSLLAFIAFLFFASIISLSLIFYYSKKGRRSYK

SEQ ID NO: 1417 - protein, 441 aa, Homo sapiens
MLQCPSVEVSFLPLIVNTVALPDELSYICTHGEDWDVAYIIHLYPSLTLRNLLPYSLRYLLEGTAETHELAEGSTADVLHSRISGEIMELVLVKYQGKNWNGHFRIRDTLPEFFPVCFSSDSTEVTTVDLSVHVRRIGSRMVLSVFSPYWLINKTTRVLQYRSEDIHVKHPADFRDIILFSFKKKNIFTKNKVQLKISTSAWSSSFSLDTVGSYGCVKCPANNMEYLVGVSIKMSSFNLSRIVTLTPFCTIANKSSLELEVGEIASDGSMPTNKWNYIASSECLPFWPESLSGKLCVRVVGCEGSSKPFFYNRQDNGTLLSLEDLNGGILVDVNTAEHSTVITFSDYHEGSAPALIMNHTPWDILTYKQSGSPEEMVLLPRQARLFAWADPTGTRKLTWTYAANVGEHDLLKVSFDVNECYMSYLTVKEVEKLSSLTPCPN

SEQ ID NO: 1418 - protein, 662 aa, Homo sapiens
MRGAGPSPRQSPRTLRPDPGPAMSFFRRKVKGKEQEKTSDVKSIKASISVHSPQKSTKNHALLEAAGPSHVAINAISANMDSFSSSRTATLKKQPSHMEAAHFGDLGRSCLDYQTQETKSSLSKTLEQVLHDTIVLPYFIQFMELRRMEHLVKFWLEAESFHSTTWSRIRAHSLNTVKQSSLAEPVSPSKKHETTASFLTDSLDKRLEDSGSAQLFMTHSEGIDLNNRTNSTQNHLLLSQECDSAHSLRLEMARAGTHQVSMETQESSSTLTVASRNSPASPLKELSGKLMKSIEQDAVNTFTKYISPDAAKPIPITEAMRNDIIARICGEDGQVDPNCFVLAQSIVFSAMEQEHFSEFLRSHHFCKYQIEVLTSGTVYLADILFCESALFYFSEYMEKEDAVNILQFWLAADNFQSQLAAKKGQYDGQEAQNDAMILYDKYFSLQATHPLGFDDVVRLEIESNICREGGPLPNCFTTPLRQAWTTMEKVFLPGFLSSNLYYKYLNDLIHSVRGDEFLGGNVSLTAPGSVGPPDESHPGSSDSSASQSSVKKASIKILKNFDEAIIVDAASLDPESLYQRTYAGKMTFGRVSDLGQFIRESEPEPDVRKSKGSMFSQAMKKWVQGNTDEAQEELAWKIAKMIVSDIMQQAQYDQPLEKSTKL

SEQ ID NO: 1419 - protein, 382 aa, Homo sapiens
MSVLRRMMRVSNRSLLAFIFFFSLSSSCLYFIYVAPGIANTYLFMVQARGIMLRENVKTIGHMIRLYTNKNSTLNGTDYPEGNNSSDYLVQTTTYLPENFTYSPYLPCPEKLPYMRGFLNVNVSEVSFDEIHQLFSKDLDIEPGGHWRPKDCKPRWKVAVLIPFRNRHEHLPIFFLHLIPMLQKQRLEFAFYVIEQTGTQPFNRAMLFNVGFKEAMKDSVWDCVIFHDVDHLPENDRNYYGCGEMPRHFAAKLDKYMYILPYKEFFGGVSGLTVEQFRKINGFPNAFWGWGGEDDDLWNRVHYAGYNVTRPEGDLGKYKSIPHHHRGEVQFLGRYKLLRYSKERQYIDGLNNLIYRPKILVDRLYTNISVNLMPELAPIEDY

SEQ ID NO: 1420 - protein, 227 aa, Homo sapiens
MFEPVSCTFTYLLGDRESREAVLIDPVLETAPRDAQLIKELGLRLLYAVNTHCHADHITGSGLLRSLLPGCQSVISRLSGAQADLHIEDGDSIRFGRFALETRASPGHTPGCVTFVLNDHSMAFTGDALLIRGCGRTDFQQGCAKTLYHSVHEKIFTLPGDCLIYPAHDYHGFTVSTVEEERTLNPRLTLSCEEFVKIMGNLNLPKPQQIDFAVPANMRCGVQTPTA

SEQ ID NO: 1421 - protein, 1321 aa, Homo sapiens
MGAPFVWALGLLMLQMLLFVAGEQGTQDITDASERGLHMQKLGSGSVQAALAELVALPCLFTLQPRPSAARDAPRIKWTKVRTASGQRQDLPILVAKDNVVRVAKSWQGRVSLPSYPRRRANATLLLGPLRASDSGLYRCQVVRGIEDEQDLVPLEVTGVVFHYRSARDRYALTFAEAQEACRLSSAIIAAPRHLQAAFEDGFDNCDAGWLSDRTVRYPITQSRPGCYGDRSSLPGVRSYGRRNPQELYDVYCFARELGGEVFYVGPARRLTLAGARAQCRRQGAALASVGQLHLAWHEGLDQCDPGWLADGSVRYPIQTPRRRCGGPAPGVRTVYRFANRTGFPSPAERFDAYCFRAHHPTSQHGDLETPSSGDEGEILSAEGPPVRELEPTLEEEEVVTPDFQEPLVSSGEEETLILEEKQESQQTLSPTPGDPMLASWPTGEVWLSTVAPSPSDMGAGTAASSHTEVAPTDPMPRRRGRFKGLNGRYFQQQEPEPGLQGGMEASAQPPTSEAAVNQMEPPLAMAVTEMLGSGQSRSPWADLTNEVDMPGAGSAGGKSSPEPWLWPPTMVPPSISGHSRAPVLELEKAEGPSARPATPDLFWSPLEATVSAPSPAPWEAFPVATSPDLPMMAMLRGPKEWMLPHPTPISTEANRVEAHGEATATAPPSPAAETKVYSLPLSLTPTGQGGEAMPTTPESPRADFRETGETSPAQVNKAEHSSSSPWPSVNRNVAVGFVPTETATEPTGLRGIPGSESGVFDTAESPTSGLQATVDEVQDPWPSVYSKGLDASSPSAPLGSPGVFLVPKVTPNLEPWVATDEGPTVNPMDSTVTPAPSDASGIWEPGSQVFEEAESTTLSPQVALDTSIVTPLTTLEQGDKVGVPAMSTLGSSSSQPHPEPEDQVETQGTSGASVPPHQSSPLGKPAVPPGTPTAASVGESASVSSGEPTVPWDPSSTLLPVTLGIEDFELEVLAGSPGVESFWEEVASGEEPALPGTPMNAGAEEVHSDPCENNPCLHGGTCNANGTMYGCSCDQGFAGENCEIDIDDCLCSPCENGGTCIDEVNGFVCLCLPSYGGSFCEKDTEGCDRGWHKFQGHCYRYFAHRRAWEDAEKDCRRRSGHLTSVHSPEEHSFINSFGHENTWIGLNDRIVERDFQWTDNTGLQFENWRENQPDNFFAGGEDCVVMVAHESGRWNDVPCNYNLPYVCKKGTVLCGPPPAVENASLIGARKAKYNVHATVRYQCNEGFAQHHVATIRCRSNGKWDRPQIVCTKPRRSHRMRRHHHHHQHHHQHHHHKSRKERRKHKKHPTEDWEKDEGNFC

SEQ ID NO: 1422 - protein, 652 aa, Homo sapiens
MATSMGLLLLLLLLLTQPGAGTGADTEAVVCVGTACYTAHSGKLSAAEAQNHCNQNGGNLATVKSKEEAQHVQRVLAQLLRREAALTARMSKFWIGLQREKGKCLDPSLPLKGFSWVGGGEDTPYSNWHKELRNSCISKRCVSLLLDLSQPLLPSRLPKWSEGPCGSPGSPGSNIEGFVCKFSFKGMCRPLALGGPGQVTYTTPFQTTSSSLEAVPFASAANVACGEGDKDETQSHYFLCKEKAPDVFDWGSSGPLCVSPKYGCNFNNGGCHQDCFEGGDGSFLCGCRPGFRLLDDLVTCASRNPCSSSPCRGGATCVLGPHGKNYTCRCPQGYQLDSSQLDCVDVDECQDSPCAQECVNTPGGFRCECWVGYEPGGPGEGACQDVDECALGRSPCAQGCTNTDGSFHCSCEEGYVLAGEDGTQCQDVDECVGPGGPLCDSLCFNTQGSFHCGCLPGWVLAPNGVSCTMGPVSLGPPSGPPDEEDKGEKEGSTVPRAATASPTRGPEGTPKATPTTSRPSLSSDAPITSAPLKMLAPSGSPGVWREPSIHHATAASGPQEPAGGDSSVATQNNDGTDGQKLLLFYILGTVVAILLLLALALGLLVYRKRRAKREEKKEKKPQNAADSYSWVPERAESRAMENQYSPTPGTDC

SEQ ID NO: 1423 - protein, 153 aa, Homo sapiens
MREYKLVVLGSGGVGKSALTVQFVQGIFVEKYDPTIEDSYRKQVEVDAQQCMLEILDTAGTEQFTAMRDLYMKNGQGFALVYSITAQSTFNDLQDLREQILRVKDTDDVPMILVGNKCDLEDERVVGKEQGQNLADNGTTVHSYESFGNSKNK

SEQ ID NO: 1424 - protein, 69 aa, Homo sapiens
EAEAAKMLGEALSKNPGYIKLRKIRAAQNISKTIATSQNRIYLTADNLVLNLQDESFTRGSDSLIKGKK

SEQ ID NO: 1425 - protein, 2641 aa, Homo sapiens [sequence omitted]

SEQ ID NO: 1426 - protein, 196 aa, Homo sapiens
GTRPRAAQILAAEAGLPSSRSFMGFAAPFTNKRKAYSERRIMGYSMQEMYEVVSNVQEYREFVPWCKKSLVVSSRKGHLKAQLEVGFPPVMERYTSAVSMVKPHMVKAVCTDGKLFNHLETIWRFSPGIPAYPRTCTVDFSISFEFRSLLHSQLATMFFDEVVKQNVAAFERRAATKFGPETAIPRELMFHEVHQT

SEQ ID NO: 1427 - protein, 284 aa, Homo sapiens
MCNTPTYCDLGKAAKDVFNKGYGFGMVKIDLKTKSCSGVMEFSTSGHAYTDTGKASGNLETKYKVCNYGLTFTQKWNTDNTLGTEISWENKLAEGLKLTLDTIFVPNTGKKSGKLKASYKRDCFSVGSNVDIDFSGPTIYGWAVLAFEGWLAGYQMSFDTAKSKLSQNNFALGYKAADFQLHTHVNDGTEFGGSIYQKVNEKIETSINLAWTAGSNNTRFGIAAKYMLDCRTSLSAKVNNASLIGLGYTQTLRPGVKLTLSALIDGKNFSAGGHKVGLGFELEA

SEQ ID NO: 1428 - protein, 345 aa, Homo sapiens [sequence omitted]

SEQ ID NO: 1429 - protein, 511 aa, Homo sapiens [sequence omitted]

SEQ ID NO: 1430 - protein, 199 aa, Homo sapiens
MANRGPAYGLSREVQQKIEKQYDADLEQILIQWITTQCRKDVGRPQPGRENFQNWLKDGTVLCELINAQYPEGQAPVKKIQASTMAFKQMEQISQFLQAAERYGINTTDIFQTVDLWEGKNMACVQRTLMNLGGLAVARDDGLFSGDPNWFPKKSKENPRNFSDNQLQEGKNVIGLQMGTNRGASQAGMTGYGMPRQIL

SEQ ID NO: 1431 - protein, 382 aa, Homo sapiens
MSHIQIPPGLTELLQGYTVEVLRQQPPDLVEFAVEYFTRLREARAPASVLPAATPRQSLGHPPPEPGPDRVADAKGDSESEEDEDLEVPVPSRFNRRVSVCAETYNPDEEEEDTDPRVIHPKTDEQRCRLQEACKDILLFKNLDQEQLSQVLDAMFERIVKADEHVIDQGDDGDNFYVIERGTYDILVTKDNQTRSVGQYDNRGSFGELALMYNTPRAATIVATSEGSLWGLDRVTFRRIIVKNNAKKRKMFESFIESVPLLKSLEVSERMKIVDVIGEKIYKDGERIITQTKSNKDGGNQEVEIARCHKGQYFGELALVTNKPRAASAYAVGDVKCLVMDVQAFERLLGPCMDIMKRNISHYEEQLVKMFGSSVDLGNLGQ

SEQ ID NO: 1432 - protein, 212 aa, Homo sapiens
RMCMRHRSIETKLRQFTNALLESLINPLQERIEDWKKAANQLDKDHAKEYKRARHEIKKKSSDTLKLQKKARKGKGDLQPQLDSALQDVNDMYLLLEETEKQAVRRALIEERGRFCTFITFLQPVVNGELTMLGEITHLQGIIDDLVVLTAEPHKLPPASEQVIKDLKGSDYSWSYQTPPSVPSEPFVSFLSVRFWKNSPLLPAPSTPSSPI

SEQ ID NO: 1433 - protein, 562 aa, Homo sapiens
MVKSRLNSWFQHRPPGASPERYLGLPGSLKWEDRGPSGQGQGQFLIQQVTLKIPISIEFVFESGSAQAGGNQALPRLAGSLLTQALESHAEGFRERFEKTFQLKEKGLSSGEQVLGQAALSGLLGGIGYFYGQGLVLPDIGVEGSEQKVDPALFPPVPLFTAVPSRSFFPRGFLWDEGFHQLVVQRWDPSLTREALGHWLGLLNADGWIGREQILGDEARARVPPEFLVQRAVHANPPTLLLPVAHMLEVGDPDDLAFLRKALPRLHAWFSWLHQSQAGPLPLSYRWRGRDPALPTLLNPKTLPSGLDDYPRASHPSVTERHLDLRCWVALGARVLTRLAEHLGEAEVAAELGPLAASLEAAESLDELHWAPELGVFADFGNHTKAVQLKPRPPQGLVRVVGRPQPQLQYVDALGYVSLFPLLLRLLDPTSSRLGPLLDILADSRHLWSPFGLRSLAASSSFYGQRNSEHDPPYWRGAVWLNVNYLALGALHHYGHLEGPHQARAAKLHGELRANVVGNVWRQYQATGFLWEQYSDRDGRGMGCRPFHGWTSLVLLAMAEDY

SEQ ID NO: 1434 - protein, 184 aa, Homo sapiens
MATALALRSLYRARPSLRCPPVELPWAPRRGHRLSPADDELYQRTRISLLQREAAQAMYIDSYNSRGFMINGNRVLGPCALLPHSVVQWNVGSHQDITEDSFSLFWLLEPRIEIVVVGTGDRTERLQSQVLQAMRQRGIAVEVQDTPNACATFNFLCHEGRVTGAALIPPPGGTSLTSLGQAAQ

SEQ ID NO: 1435 - protein, 314 aa, Homo sapiens
ARGGIIRRIQTRGEGYAKPNEGAIVEVALEGYYKDKLFDQRELRFEIGEGENLDLPYGLERAIQRMEKGEHSIVYLKPSYAFGSVGKEKFQIPPNAELKYELHLKSFEKAKESWEMNSEEKLEQSTIVKERGTVYFKEGKYKQALLQYKKIVSWLEYESSFSNEEAQKAQALRLASHLNLAMCHLKLQAFSAAIESCNKALELDSNNEKGLFRRGEAHLAVNDFELARADFQKVLQLYPNNKAAKTQLAVCQQRIRRQLAREKKLYANMFERLAEEENKAKAEASSGDHPTDTEMKEEQKSNTAGSQSQVETEA

SEQ ID NO: 1436 - protein, 597 aa, Homo sapiens [sequence omitted]

SEQ ID NO: 1437 - protein, 539 aa, Homo sapiens
SMGTLAFDEYGRPFLIIKDQDRKSRLMGLEALKSHIMAAKAVANTMRTSLGPNGLDKMMVDKDGDVTVTNDGATILSMMDVDHQIAKLMVELSKSQDDEIGDGTTGVVVLAGALLEEAEQLLDRGIHPIRIADGYEQAARVAIEHLDKISDSVLVDIKDTEPLIQTAKTTLGSKVVNSCHRQMAEIAVNAVLTVADMERRDVDFELIKVEGKVGGRLEDTKLIKGVIVDKDFSHPQMPKKVEDAKIAILTCPFEPPKPKTKHKLDVTSVEDYKALQKYEKEKFEEMIQQIKETGANLAICQWGFDDEANHLLLQNNLPAVRWVGGPEIELIAIATGGRIVPRFSELTAEKLGFAGLVQEISFGTTKDKMLVIEQCKNSRAVTIFIRGGNKMIIEEAKRSLHDALCVIRNLIRDNRVVYGGGAAEISCALAVSQEADKCPTLEQYAMRAFADALEVIPMALSENSGMNPIQTMTEVRARQVKEMNPALGIDCLHKGTNDMKQQHVIETLIGKKQQISLATQMVRMILKIDDIRKPGESEE

SEQ ID NO: 1438 - protein, 475 aa, Homo sapiens
ETPGASASSLLLPAASRPPRKREAGEAGAATSKQRVLDEEEYIEGLQTVIQRDFFPDVEKLQAQKEYLEAEENGDLERMRQIAIKFGSALGKMSREPPPPYVTPATFETPEVHAGTGVVGNKPRPRGRGLEDGEAGEEEEKEPLPSLDVFLSRYTSEDNASFQEIMEVAKERSRARHAWLYQAEEEFEKRQKDNLELPSAEHQAIESSQASVETWKYKAKNSLMYYPEGVPDEEQLFKKPRQVVHKNTRFLRDPFSQALSRCQLQQAAALNAQHKQGKVGPDGKELIPQESPRVGGFGFVATPSPAPGVNESPMMTWGEVENTPLRVEGSETPYVDRTPGPAFKILEPGRRERLGLKMANEAAAKNRAKKQEALRRVTENLASLTPKGLSPAMSPALQRLVSRTASKYTDRALRASYTPSPARSTHLKTPASGLQTPTSTPAPGSATRTPLTQDPASITDNLLQLPARRKASDFF

SEQ ID NO: 1439 - protein, 243 aa, Homo sapiens
ELFLAGRRVLVTGAGKGIGRGTVQALHATGARVVAVSRTQADLDSLVRECPGIEPVCVDLGDWEATERALGSVGPVDLLVNNAAVALLQPFLEVTKEAFDRSFEVNLRAVIQVSQIVARGLIARGVPGAIVNVSSQCSQRAVTNHSVYCSTKGALDMLTKVMALELGPHKIRVNAVNPTVVMTSMGQATWSDPHKAKTMLNRIPLGKFAEVEHVVNAILFLLSDRSGMTTGSTLPVEGGFWAC

SEQ ID NO: 1440 - protein, 402 aa, Homo sapiens
HADVYTFNALIEATVCAINEKFEEKWSKILELLRHMVAQKVKPNLQTFNTILKCLRRFHVFARSPALQVLREMKAIGIEPSLATYHHIIRLFDQPGDPLKRSSFIIYDIMNELMGKRFSPKDPDDDKFFQSAMSICSSLRDLELAYQVHGLLKTGDNWKFIGPDQHRNFYYSKFFDLICLMEQIDVTLKWYEDLIPSAYFLHSQTMIHLLQALDVANRLEVIPKIWKDSKEYGHTFRSDLREEILMLMARDKHPPELQVAFADCAADIKSAYESQPIRQTAQDWPATSLNCIAILFLRAGRTQEAWKMLGLFRKHNKIPRSELLNELMDSAKVSNSPSQAIEVVELASAFSLPICEGLTQRVMSDFAINQEQKEALSNLTALTSDSDTDSSSDSDSDTSEGK

SEQ ID NO: 1441 - protein, 198 aa, Homo sapiens
EFQTNLVPYPRIHFPLATYAPVISAEKAYHEQLSVAEITNACFEPANQMVKCDPRHGKYMACCLLYRGDVVPKDVNAAIATIKTKRSIQFVDWCPTGFKVGINYQPPTVVPGGDLAKVQRAVCMLSNTTAIAEAWARLDHKFDLMYAKRAFVHWYVGEGMEEGEFSEAREDMAALEKDYEEVGVDSVEGEGEEEGEEY

SEQ ID NO: 1442 - protein, 188 aa, Homo sapiens [sequence omitted]

SEQ ID NO: 1443 - protein, 132 aa, Homo sapiens
HEAEAERVLRYLVEVEELAEEVLADKRQIVDLDTKRNQNREGLRALQKDLSLSEDVMVCFGNMFIKMPHPETKEMIEKDQDHLDKEIEKLRKQLKVKVNRLFEAQGKPELKGFNLNPLNQDELKALKVILKG

SEQ ID NO: 1444 - protein, 392 aa, Homo sapiens
MAAAALGQIWARKLLSVPWLLCGPRRYASSSFKAADLQLEMTQKPHKKPGPGEPLVFGKTFTDHMLMVEWNDKGWGQPRIQPFQNLTLHPASSSLHYSLQLFEGMKAFKGKDQQVRLFRPWLNMDRMLRSAMRLCLPSFDKLELLECIRRLIEVDKDWVPDAAGTSLYVRPVLIGNEPSLGVSQPTRALLFVILCPVGAYFPGGSVTPVSLLADPAFIRAWVGGVGNYKLGGNYGPTVLVQQEALKRGCEQVLWLYGPDHQLTEVGTMNIFVYWTHEDGVLELVTPPLNGVILPGVVRQSLLDMAQTWGEFRVVERTITMKQLLRALEEGRVREVFGSGTACQVCPVHRILYKDRNLHIPTMENGPELILRFQKELKEIQYGIRAHEWMFPV

SEQ ID NO: 1445 - protein, 393 aa, Homo sapiens
MALKVATVAGSAAKAVLGPALLCRPWEVLGAHEVPSRNIFSEQTIPPSAKYGGRHTVTMIPGDGIGPELMLHVKSVFRHACVPVDFEEVHVSSNADEEDIRNAIMAIRRNRVALKGNIETNHNLPPSHKSRNNILRTSLDLYANVIHCKSLPGVVTRHKDIDILIVRENTEGEYSSLEHESVAGVVESLKIITKAKSLRIAEYAFKLAQESGRKKVTAVHKANIMKLGDGLFLQCCREVAARYPQITFENMIVDNTTMQLVSRPQQLDVMVMPNLYGNIVNNVCAGLVGGPGLVAGANYGHVYAVFETATRNTGKSIANKNIANPTATLLASCMMLDHLKLHSYATSIRKAVLASMDNENMHTPDIGGQGTTSEAIQDVIRHIRVINGRAVEA

SEQ ID NO: 1446 - protein, 415 aa, Homo sapiens
MLWSGCRRFGARLGCLPGGLRVLVQTGHRSLTSCIDPSMGLNEEQKEFQKVAFDFAAREMAPNMAEWDQKELFPVDVMRKAAQLGFGGVYIQTDVGGSGLSRLDTSVIFEALATGCTSTTAYISIHNMCAWMIDSFGNEEQRHKFCPPLCTMEKFASYCLTEPGSGSDAASLLTSAKKQGDHYILNGSKAFISGAGESDIYVVMCRTGGLGPKGISCIVVEKGTPGLSFGKKEKKVGWNSQPTRAVIFEDCAVPVANRIGSEGQGFLIAVRGLNGGRINIASCSLGAAHASVILTRDHLNVRKQFGEPLASNQYLQFTLADMATRLVAARLMVRNAAVALQEERKDAVALCSMAKLFATDECFAICNQALQMHGGYGYLKDYAVQQYVRDSRVHQILEGSNEVMRILISRSLLQE

SEQ ID NO: 1447 - protein, 494 aa, Homo sapiens
STSGSQGHKKGARTPKVPKQGGMNWADLLPPPPAHPPPHSNSEEYNISVDESYDQEMPCPVPPARMYLQQDELEEEEDERGPTPPVRGAASSPAAVSYSHQSTATLTPSPQEELQPMLQDCPEETGHMQHQPDRRRQPVSPPPPPRPISPPHTYGYISGPLVSDMDTDAPEEEEDEADMEVAKMQTRRLLLRGLEQTPASSVGDLESSVTGSMINGWGSASEEDNISSGRSSVSSSDGSFFTDADFAQAVAAAAEYAGLKVARRQMQDAAGRRHFHASQCPRPTSPVSTDSNMSAAVMQKTRPAKKLKHQPGHLRRETYTDDLPPPPVPPPAIKSPTAQSKTQLEVRPVVVPKLPSMDARTDRSSDRKGSSYKGREVLDGRQVVDMRTNPGDPREAQEQQNDGKGRGNKAAKRDLPPAKTHLIQEDILPYCRPTFPTSNNPRDPSSSSSMSSRGSGSRQREQANVGRRNIAEMQVLGGYERGEDNNEELEETES

SEQ ID NO: 1448 - protein, 514 aa, Homo sapiens
MADSGLDKKSTKCPDCSSASQKDVLCVCSSKTRVPPVLVVEMSQTSSIGSAESLISLERKKEKNINRDITSRKDLPSRTSNVERKASQQQWGRGNFTEGKVPHIRIENGAAIEEIYTFGRILGKGSFGIVIEATDKETETKWAIKKVNKEKAGSSAVKLLEREVNILKSVKHEHIIHLEQVFETPKKMYLVMELCEDGELKEILDRKGHFSENETRWIIQSLASAIAYLHNNDIVHRDLKLENIMVKSSLIDDNNEINLNIKVTDFGLAVKKQSRSEAMLQATCGTPIYMAPEVISAHDYSQQCDIWSIGVVMYMLLRGEPPFLASSEEKLFELIRKGELHFENAVWNSISDCAKSVLKQLMKVDPAHRITAKELLDNQWLTGNKLSSVRPTNVLEMMKEWKNNPESVEENTTEEKNKPSTEEKLKSYQPWGNVPDANYTSDEEEEKQSTAYEKQFPATSKDNFDMCSSSFTSSKLLPAEIKGEMEKTPVTPSQGTATKYPAKSGALSRTKKKL

SEQ ID NO: 1449 - protein, 1336 aa, Homo sapiens
MATEIGSPPRFFHMPRFQHQAPRQLFYKRPDFAQQQAMQQLTFDGKRMRKAVNRKTIDYNPSVIKYLENRIWQRDQRDMRAIQPDAGYYNDLVPPIGMLNNPMNAVTTKFVRTSTNKVKCPVFVVRWTPEGRRLVTGASSGEFTLWNGLTFNFETILQAHDSPVRAMTWSHNDMWMLTADHGGYVKYWQSNMNNVKMFQAHKEAIREASFSPTDNKFATCSDDGTVRIWDFLRCHEERILRGHGADVKCVDWHPTKGLVVSGSKDSQQPIKFWDPKTGQSLATLHAHKNTVMEVKLNLNGNWLLTASRDHLCKLFDIRNLKEELQVFRGHKKEATAVAWHPVHEGLFASGGSDGSLLFWHVGVEKEVGGMEMAHEGMIWSLAWHPLGHILCSGSNDHTSKFWTRNRPGDKMRDRYNLNLLPGMSEDGVEYDDLEPNSLAVIPGMGIPEQLKLAMEQEQMGKDESNEIEMTIPGLDWGMEEVMQKDQKKVPQKKVPYAKPIPAQFQQAWMQNKVPIPAPNEVLNDRKEDIKLEEKKKTQAEIEQEMATLQYTNPQLLEQLKIERLAQKQVEQIQPPPSSGTPLLGPQPFPGQGPMSQIPQGFQQPHPSQQMPMNMAQMGPPGPQGQFRPPGPQGQMGPQGPPLHQGGGGPQGFMGPQGPQGPPQGLPRPQDMHGPQGMQRHPGPHGPLGPQGPPGPQGSSGPQGHMGPQGPPGPQSHIGPQGPPGPQGHLGPQGPPGTQGMQGPPGPRGMQGPPHPHGIQGGPGSQGIQGPVSQGPLMGLNPRGMQGPPGPRENQGPAPQGMIMGHPPQEMRGPHPPGGLLGHGPQEMRGPQEIRGMQGPPPQGSMLGPPQELRGPPGSQSQQGPPQGSLGPPPQGGMQGPPGPQGQQNPARGPHPSQGPIPFQQQKTPLLGDGPRAPFNQEGQSTGPPPLIPGLGQQGAQGRIPPLNPGQGPGPNKGDSRGPPNHHMGPMSERRHEQSGGPEHGPERGPFRGGQDCRGPPDRRGPHPDFPDDFSRPDDFHPDKRFGHRLREFEGRGGPLPQEEKWRRGGPGPPFPPDHREFSEGDGRGAARGPPGAWEGRRPGDERFPRDPEDPRFRGRREESFRRGAPPRHEGRAPPRGRDGFPGPEDFGPEENFDASEEAARGRDLRGRGRGTPRGGRKGLLPTPDEFPRFEGGRKPDSWDGNREPGPGHEHFRDTPRPDHPPHDGHSPASRERSSSLQGMDMASLPPRKRPWHDGPGTSEHREMEAPGGPSEDRGGKGRGGPGPAQRVPKSGRSSSLDGEHHDGYHRDEPFGGPPGSGTPSRGGRSGSNWGRGSNMNSGPPRRGASRGGGRGR

SEQ ID NO: 1450 - protein, 442 aa, Homo sapiens [sequence omitted]

SEQ ID NO: 1451 - protein, 218 aa, Homo sapiens
MARKKVRPRLIAELARRVRALREQLNRPRDSQLYAVDYETLTRPFSGRRLPVRAWADVRRESRLLQLLGRLPLFGLGRLVTRKSWLWQHDEPCYWRLTRVRPDYTAQNLDHGKAWGILTFKGKTESEAREIEHVMYHDWRLVPKHEEEAFTAFTPAPEDSLASVPYPPLLRAMIIAERQKNGDTSTEEPMLNVQRIRMEPWDYPAKQEDKGRAKGTPV

SEQ ID NO: 1452 - protein, 601 aa, Homo sapiens
MPERELWPAGTGSEPVTRVGSCDSMMSSTSTRSGSSDSSYDFLSTEEKECLLFLEETIGSLDTEADSGLSTDESEPATTPRGFRALPITQPTPRGGPEETITQQGRTPRTVTESSSSHPPEPQGLGLRSGSYSLPRNIHIARSQNFRKSTTQASSHNPGEPGRLAPEPEKEQVSQSSQPRQAPASPQEAALDLDVVLIPPPEAFRDTQPEQCREASLPEGPGQQGHTPQLHTPSSSQEREQTPSEAMSQKAKETVSTRYTQPQPPPAGLPQNARAEDAPLSSGEDPNSRLAPLTTPKPRKLPPNIVLKSSRSSFHSDPQHWLSRHTEAAPGDSGLISCSLQEQRKARKEALEKLGLPQDQDEPGLHLSKPTSSIRPKETRAQHLSPAPGLAQPAAPAQASAAIPAAGKALAQAPAPAPGPAQGPLPMKSPAPGNVAASKSMPIPIPKAPRANSALTPPKPESGLTLQESNTPGLRQMNFKSNTLERSGVGLSSYLSTEKDASPKTSTSLGKGSFLDKISPSVLRNSRPRPASLGTGKDFAGIQVGKLADLEQEQSSKRLSYQGQSRDKLPRPPCVSVKISPKGVPNEHRREALKKLGLLKE

SEQ ID NO: 1453 - protein, 926 aa, Homo sapiens
MLQVHRTGLGRLGVSLSKGLHHKAVLAVRREDVNAWERRAPLAPKHIKGITNLGYKVLIQPSNRRAIHDKDYVKAGGILQEDISEACLILGVKRPPEEKLMSRKTYAFFSHTIKAQEANMGLLDEILKQEIRLIDYEKMVDHRGVRVVAFGQWAGVAGMINILHGMGLRLLALGHHTPFMHIGMAHNYRNSSQAVQAVRDAGYEISLGLMPKSIGPLTFVFTGTGNVSKGAQAIFNELPCEYVEPHELKEVSQTGDLRKVYGTVLSRHHHLVRKTDAVYDPAEYDKHPERYISRFNTDIAPYTTCLINGIYWEQNTPRLLTRQDAQSLLAPGKFSPAGVEGCPALPHKLVAICDISADTGGSIEFMTECTTIEHPFCMYDADQHIIHDSVEGSGILMCSIDNLPAQLPIEATECFGDMLYPYVEEMILSDATQPLESQNFSPVVRDAVITSNGTLPDKYKYIQTLRESRERAQSLSMGTRRKVLVLGSGYISEPVLEYLSRDGNIEITVGSDMKNQIEQLGKKYNINPVSMDICKQEEKLGFLVAKQDLVISLLPYVLHPLVAKACITNKVNMVTASYITPALKELEKSVEDAGITIIGELGLDPGLDHMLAMETIDKAKEVGATIESYISYCGGLPAPEHSNNPLRYKFSWSPVGVLMNVMQSATYLLDGKVVNVAGGISFLDAVTSMDFFPGLNLEGYPNRDSTKYAEIYGISSAHTLLRGTLRYKGYMKALNGFVKLGLINREALPAFRPEANPLTWKQLLCDLVGISPSSEHDVLKEAVLKKLGGDNTQLEAAEWLGLLGDEQVPQAESILDALSKHLVMKLSYGPEEKDMIVMRDSFGIRHPSGHLEHKTIDLVAYGDINGFSAMAKTVGLPTAMAAKMLLDGEIGAKGLMGPFSKEIYGPILERIKAEGIIYTTQSTIKP

SEQ ID NO: 1454 - protein, 187 aa, Homo sapiens
MNGRADFREPNAEVPRPIPHIGPDYIPTEEERRVFAECNDESFWFRSVPLAATSMLITQGLISKGILSSHPKYGSIPKLILACIMGYFAGKLSYVKTCQEKFKKLENSPLGEALRSGQARRSSPPGHYYQKSKYDSSVSGQSSFVTSPAADNIEMLPHYEPIPFSSSMNESAPTGITDHIVQGRNFS

SEQ ID NO: 1455 - protein, 162 aa, Homo sapiens
AVPIAQKSEPHSLSSEALMRRAVSLVTDSTSTDLSQTTYALIEAITEYTKAVYTLTSLYRQYTSLLGKMNSEEEDEVWQVIIGARAEMTSKHQEYLKLETTWMTAVGLSEMAAEAAYQTGADQASITARNHIQLVKLQVEEVHQLSRKAETKLAEAQIEELR

SEQ ID NO: 1456 - protein, 965 aa, Homo sapiens
SEESQAFQRQLTALIGYDVTDVSNVHDDELEFTRRGLVTPRMAEVASRDPKLYAMHPWVTSKPLPEYLWKKIANNCIFIKIHRSTTSQTIKVSPDDTPGAILQSFFTKMAKKKSLMDIPESQSEQDFVLRVCGRDEYLVGETPIKNFQWVRHCLKNGEEIHVVLDTPPDPALDEVRKEEWPLADDCTGVTGYHEQLTIHGKDHESVFTVSLWDCDRKFRVKIRGIDIPVLPRNTDLTVFVEANIQHGQQVLCQRRTSPKPFTEEVLWNVWLEFSIKIKDLPKGALLNLQIYCGKAPALSSKASAESPSSESKGKVRLLYYVNLLLIDHRFLLRRGEYVLHMWQISGKGEDQGSFNADKLTSATNPDKENSMSISILLDNYCHPIALPKHQPTPDPEGDRVRAEMPNQLRKQLEAIIATDPLNPLTAEDKELLWHFRYESLKHPKAYPKLFSSVKWGQQEIVAKTYQLLARREVWDQSALDVGLTMQLLDCNFSDENVRAIAVQKLESLEDDDVLHYLLQLVQAVKFEPYHDSALARFLLKRGLRNKRIGHFLFWFLRSEIAQSRHYQQRFAVILEAYLRGCGTAMLHDFTQQVQVIEMLQKVTLDIKSLSAEKYDVSSQVISQLKQKLENLQNSQLPESFRVPYDPGLKAGALAIEKCKVMASKKKPLWLEFKCADPTALSNETIGIIFKHGDDLRQDMLILQILRIMESIWETESLDLCLLPYGCISTGDKIGMIEIVKDATTIAKIQQSTVGNTGAFKDEVLNHWLKEKSPTEEKFQAAVERFVYSCAGYCVATFVLGIGDRHNDNIMITETGNLFHIDFGHILGNYKSFLGINKERVPFVLTPDFLFVMGTSGKKTSPHFQKFQDICVKAYLALRHHTNLLIILFSMMLMTGMPQLTSKEDIEYIRDALTVGKNEEDAKKYFLDQIEVCRDKGWTVQFNWFLHLVLGIKQGEKHSAHHHHHH

SEQ ID NO: 1457 - protein, 338 aa, Homo sapiens
LMPHGKGGRSSVSGIVATVFGATGFLGRYVVNHLGRMGSQVIIPYRCDKYDIMHLRPMGDLGQLLFLEWDARDKDSIRRVVQHSNVVINLIGRDWETKNFDFEDVFVKIPQAIAQLSKEAGVEKFIHVSHLNANIKSSSRYLRNKAVGEKVVRDAFPEAIIVKPSDIFGREDRFLNSFASMHRFGPIPLGSLGWKTVKQPVYVVDVSKGIVNAVKDPDANGKSFAFVGPSRYLLFHLVKYIFAVAHRLFLPFPLPLFAYRWVARVFEISPFEPWITRDKVERMHITDMKLPHLPGLEDLGIQATPLELKAIEVLRRHRTYRWLSAEIEDVKPAKTVNI

SEQ ID NO: 1458 - protein, 74 aa, Homo sapiens
MNFKWSRRSLRVSVLTFSPRPSCHHITGCHWRVAVNVLRCYIRISAVQASKPVQCIRATGSGGACLSVCPAGEL

SEQ ID NO: 1459 - protein, 749 aa, Homo sapiens
MAAAGSRKRRLAELTVDEFLASGFDSESESESENSPQAETREAREAARSPDKPGGSPSASRRKGRASEHKDQLSRLKDRDPEFYKFLQENDQSLLNFSDSDSSEEEEGPFHSLPDVLEEASEEEDGAEEGEDGDRVPRGLKGKKNSVPVTVAMVERWKQAAKQRLTPKLFHEVVQAFRAAVATTRGDQESAEANKFQVTDSAAFNALVTFCIRDLIGCLQKLLFGKVAKDSSRMLQPSSSPLWGKLRVDIKAYLGSAIQLVSCLSETTVLAAVLRHISVLVPCFLTFPKQCRMLLKRMVVVWSTGEESLRVLAFLVLSRVCRHKKDTFLGPVLKQMYITYVRNCKFTSPGALPFISFMQWTLTELLALEPGVAYQHAFLYIRQLAIHLRNAMTTRKKETYQSVYNWQYVHCLFLWCRVLSTAGPSEALQPLVYPLAQVIIGCIKLIPTARFYPLRMHCIRALTLLSGSSGAFIPVLPFILEMFQQVDFNRKPGRMSSKPINFSVILKLSNVNLQEKAYRDGLVEQLYDLTLEYLHSQAHCIGFPELVLPVVLQLKSFLRECKVANYCRQVQQLLGKVQENSAYICSRRQRVSFGVSEQQAVEAWEKLTREEGTPLTLYYSHWRKLRDREIQLEISGKERLEDLNFPEIKRRKMADRKDEDRKQFKDLFDLNSSEEDDTEGFSERGILRPLSTRHGVEDDEEDEEEGEEDSSNSEDGDPDAEAGLAPGELQQLAQGPEDELEDLQLSEDD

SEQ ID NO: 1460 - protein, 544 aa, Homo sapiens
MLAFAARTVVKPLGFLKPFSLMKASSRFKAHQDALPRLPVPPLQQSLDHYLKALQPIVSEEEWAHTKQLVDEFQASGGVGERLQKGLERRARKTENWLSEWWLKTAYLQYRQPVVIYSSPGVMLPKQDFVDLQGQLRFAAKLIEGVLDFKVMIDNETLPVEYLGGKPLCMNQYYQILSSCRVPGPKQDTVSNFSKTKKPPTHITVVHNYQFFELDVYHSDGTPLTADQIFVQLEKIWNSSLQTNKEPVGILTSNHRNSWAKAYNTLIKDKVNRDSVRSIQKKPELVRSPMVPLPMPKKLRFNITPEIKSDIEKAKQNLSIMIQDLDITVMVFHHFGKDFPKSEKLSPDAFIQMALQLAYYRIYGQACATYESASLRMFHLGRTDTIRSASMDSLTFVKAMDDSSVTEHQKVELLRKAVQAHRGYTDRAIRGEAFDRHLLGLKLQAIEDLVSMPDIFMDTSYAIAMHFHLSTSQVPAKTDCVMFFGPVVPDGYGVCYNPMEAHINFSLSAYNSCAETNAARLAHYLEKALLDMRALLQSHPRAKL

SEQ ID NO: 1461 - protein, 489 aa, Homo sapiens
MVPSSPAVEKQVPVEPGPDPELRSWRRLVCYLCFYGFMAQIRPGESFITPYLLGPDKNFTREQVTNEITPVLSYSYLAVLVPVFLLTDYLRYTPVLLLQGLSFVSVWLLLLLGHSVAHMQLMELFYSVTMAARIAYSSYIFSLVRPARYQRVAGYSRAAVLLGVFTSSVLGQLLVTVGRVSFSTLNYISLAFLTFSVVLALFLKRPKRSLFFNRDDRGRCETSASELERMNPGPGGKLGHALRVACGDSVLARMLRELGDSLRRPQLRLWSLWWVFNSAGYYLVVYYVHILWNEVDPTTNSARVYNGAADAASTLLGAITSFAAGFVKIRWARWSKLLIAGVTATQAGLVFLLAHTRHPSSIWLCYAAFVLFRGSYQFLVPIATFQIASSLSKELCALVFGVNTFFATIVKTIITFIVSDVRGLGLPVRKQNEELHVASLSLWKSHLRLAADTLSSEGSSGSGPRSWFLSPTLRAALHGPVCPSEVCPS

SEQ ID NO: 1462 - protein, 217 aa, Homo sapiens
MSCAGAAAAPRLWRLRPGARRSLSAYGRRTSVRFRSSGMTLDNISRAAVDRIIRVDHAGEYGANRIYAGQMAVLGRTSVGPVIQKMWDQEKDHLKKFNELMVTFRVRPTVLMPLWNVLGFALGAGTALLGKEGAMACTVAVEESIAHHYNNQIRTLMEEDPEKYEELLQLIKKFRDEELEHHDIGLDHDAELAPAYAVLKSIIQAGCRVAIYLSERL

SEQ ID NO: 1463 - protein, 514 aa, Homo sapiens
GGGFAASVDYFPSEDFYRCGYCKNESGSRSNGMWAHSMTVQDYQDLIDRGWRRSGKYVYKPVMNQTCCPQYTIRCRPLQFQPSKSHKKVLKKMLKFLAKGEVPKGSCEDEPMDSTMDDAVAGDFALINKLDIQCDLKTLSDDIKESLESEGKNSKKEEPQELLQSQDFVGEKLGSGEPSHSVKVHTVPKPGKGADLSKPPCRKAKEIRKERKRLKLMQQNPAGELEGFQAQGHPPSLFPPKAKSNQPKSLEDLIFESLPENASHKLEVRVVRSSPPSSQFKATLLESYQVYKRYQMVIHKNPPDTPTESQFTRFLCSSPLEAETPPNGPDCGYGSFHQQYWLDGKIIAVGVIDILPNCVSSVYLYYDPDYSFLSLGVYSALREIAFTRQLHEKTSQLSYYYMGFYIHSCPKMKYKGQYRPSDLLCPETYVWVPIEQCLPSLENSKYCRFNQDPEAVDEDRSTEPDRLQVFHKRAIMPYGVYKKQQKDPSEEAAVLQYASLVGQKCSERMLLFRN

SEQ ID NO: 1464 - protein, 551 aa, Homo sapiens
RPRPGLRGGRAPCEVTMEAGGLPLELWRMILAYLHLPDLGRCSLVCRAWYELILSLDSTRWRQLCLGCTECRHPNWPNQPDVEPESWREAFKQHYLASKTWTKNALDLESSICFSLFRRRRERRTLSVGPGREFDSLGSALAMASLYDRIVLFPGVYEEQGEIILKVPVEIVGQGKLGEVALLASIDQHCSTTRLCNLVFTPAWFSPIMYKTTSGHVQFDNCNFENGHIQVHGPGTCQVKFCTFKNTHIFLHNVPLCVLENCEFVGSENNSVTVEGHPSADKNWAYKYLLGLIKSSPTFLPTEDSDFLMSLDLESRDQAWSPKTCDIVIEGSQSPTSPASSSPKPGSKAGSQEAEVGSDGERVAQTPDSSDGGLSPSGEDEDEDQLMYRLSYQVQGPRPVLGGSFLGPPLPGASIQLPSCLVLNSLQQELQKDKEAMALANSVQGCLIRKCLFRDGKGGVFVCSHGRAKMEGNIFRNLTYAVRCIHNSKIIMLRNDIYRCRASGIFLRLEGGGLIAGNNIYHNAEAGVDIRKKSNPLQIGNPRAEFLASRA

SEQ ID NO: 1465 - protein, 393 aa, Homo sapiens
MGKSDFLTPKAIANRIKSKGLQKLRWYCQMCQKQCRDENGFKCHCMSESHQRQLLLASENPQQFMDYFSEEFRNDFLELLRRRFGTKRVHNNIVYNEYISHREHIHMNATQWETLTDFTKWLGREGLCKVDETPKGWYIQYIDRDPETIRRQLELEKKKKQDLDDEEKTAKFIEEQVRRGLEGKEQEVPTFTELSRENDEEKVTFNLSKGACSSSGATSSKSSTLGPSALKTIGSSASVKRKESSQSSTQSKEKKKKKSALDEIMEIEEEKKRTARTDYWLQPEIIVKIITKKLGEKYHKKKAIVKEVIDKYTAVVKMIDSGDKLKLDQTHLETVIPAPGKRILVLNGGYRGNEGTLESINEKTFSATIVIETGPLKGRRVEGIQYEDISKLA

SEQ ID NO: 1466 - protein, 176 aa, Homo sapiens
MAARGRRAEPQGREAPGPAGGGGGGSRWAESGSGTSPESGDEEVSGAGSSPVSGGVNLFANDGSFLELFKRKMEEEQRQRQEEPPPGPQRPDQSAAAAGPGDPKRKGGPGSTLSFVGKRRGGNKLALKTGIVAKKQKTEDEVLTSKGDAWAKYMAEVKKYKAHQCGDDDKTRPLVK

SEQ ID NO: 1467 - protein, 230 aa, Homo sapiens
MSFKREGDDWSQLNVLKKRRVGDLLASYIPEDEALMLRDGRFACAICPHRPVLDTLAMLTAHRAGKKHLSSLQLFYGKKQPGKERKQNPKHQNELRREETKAEAPLLTQTRLITQSALHRAPHYNSCCRRKYRPEAPGPSVSLSPMPPSEVKLQSGKISREPEPAAGPQAEESATVSAPAPMSPTRRRALDHYLTLRSSGWIPDGRGRWVKDENVEFDSDEEEPPDLPLD

SEQ ID NO: 1468 - protein, 83 aa, Homo sapiens
MGLMTAPHTHQRGLQIVRDERKISGPGDSIIKRKRMRKKIADEKNQPNSGSWKADARRPLNDASTLILDFPASRTMSQYISVP

SEQ ID NO: 1469 - protein, 37 aa, Homo sapiens
MLPLKVKGRRFYFLLDKTGHFPNTKLFDNTVGAYRSL

SEQ ID NO: 1470 - protein, 243 aa, Homo sapiens
MAASSISSPWGKHVFKAILMVLVALILLHSALAQSRRDFAPPGQQKREAPVDVLTQIGRSVRGTLDAWIGPETMHLVSESSSQVLWAISSAISVAFFALSGIAAQLLNALGLAGDYLAQGLKLSPGQVQTFLLWGAGALVVYWLLSLLLGLVLALLGRILWGLKLVIFLAGFVALMRSVPDPSTRALLLLALLILYALLSRLTGSRASGAQLEAKVRGLERQVEELRWRQRRAAKGARSVEEE

SEQ ID NO: 1471 - protein, 158 aa, Homo sapiens
MFGGDTLYELRCSLQLAETEREGGFSPHISPFTAVNDLGHLLGRAGFNTLTVDTDEIQVNYPGMFELMEDLQGMGESNCAWNRKALLHRDTMLAAAAVYREMYRNEDGSVPATYQIYYMIGWKYHESQARPAERGSATVSFGELGKINNLMPPGKKSQ

SEQ ID NO: 1472 - protein, 220 aa, Homo sapiens
  VARIANT 18: Xaa = Any Amino Acid
TSWRRGEVTPRRGSGGGXETIGAKQGRTQLSSGFVNSTMEEAGLCGLREKADMLCNSESHDILQHQDSNCSATSNKHLLEDEEGRDFITKNRSWVSPVHCTQESRRELPEQEVAPPSGQQALQLQQEQRKSLRKRSFIIDASPKHSFRLQRRSWQLSVRNMLILEIHLFYRRVCFELYDLKQNSFFGDYGNILNRETLLDFVKQIMEKIQNFLKNHGKFL

SEQ ID NO: 1473 - protein, 83 aa, Homo sapiens
MILKHHFNPVFPLLTKTNSGIKGTLHLGLKCLSLLPVLSPPFRSDRTTQSPTLVRLILLLPFFSRNPSLDLRNSTSHLKVTVH

SEQ ID NO: 1474 - protein, 335 aa, Homo sapiens [sequence omitted]

SEQ ID NO: 1475 - protein, 327 aa, Homo sapiens
HEGKQLDTLGNDKGRLQSELKTMQDSVEYFKTKYEEEINKRTAAENDFVVLKKDVDAAYLNKVELEAKVDSLNDEINFLKVLYDAELSQMQTHVSDTSVVLSMDNNRNLDLDSIIAEVRAQYEEIAQRSKAEAEALYQTKVQQLQISVDQHGDNLKNTKSEIAELNRMIQRLRAEIENIKKQCQTLQVSVADAEQRGENALKDAHSKRVELEAALQQAKEELARMLREYQELMSVKLALDIEIATYRKLLEGEEYRMSGECQSAVSISVVSGSTSTGGISGGLGSGSGFGLSSGFGSGSGSGFGFGGSVSGSSSSKIISTTTLNKRR

SEQ ID NO: 1476 - protein, 586 aa, Homo sapiens
MEPAAALHFSRPASLLLLLSLCALVSAQVTVVGPTDPILAMVGENTTLRCCLSPEENAEDMEVRWFQSQFSPAVFVYKGGRERTEEQKEEYRGRTTFVSKDSRGSVALIIHNVTAEDNGIYQCYFQEGRSCNEAILHLVVAGLDSEPVIEMRDHEDGGIQLECISGGWYPKPLTVWRDPYGEVVPALKEVSTPDADSLFMVTTAVIIRDKSVRNVSCSINDTLLGQKKESVIFIPESFMPSRSPCVVILPVIMIILMIPIAICIYWINNLQKEKKDSHLMTFNLCLSLAGWRRTFLHAANVVLDQDTGHPYLFVSEDKRSVTLDPSRESIPGNPERFDSQLCVLGQESFASGKHYLEVDVENVIEWTVGICRDNVERKWEVPLLPQNGFWTLEMHKRKYWALTSLKWILSLEEPLCQVGIFLDYEAGDVSFYNMRDRSHIYTFPHSAFSVPVRPFFSLGSYDSQILICSAFTGASGVTVPEEGWTLHRAGTHHSPQNQFPSLTAMETSPGHLSSHCTMPLVEDTPSSPLVTQENIFQLPLSHPLQTSAPVHLLIRCGFSSSFGCNYGMESRHRELVVPQLPARKKV

SEQ ID NO: 1477 - protein, 1826 aa, Homo sapiens
MGDSKVKVAVRIRPMNRRETDLHTKCVVDVDANKVILNPVNTNLSKGDARGQPKCFAYDHCFWSMDESVKEKYAGQDIVFKCLGENILQNAFDGYNACIFAYGQTGSGKSYTMMGTADQPGLIPRLCSGLFERTQKEENEEQSFKVEVSYMEIYNEKVRDLLDPKGSRQTLKVREHSVLGPYVDGLSKLAATSYKDIESLMSEGNKSRTVAATNMNEESSRSHAVLKITLTHTLYDAKSGTSGEKVGKLSLVDLAGSERATKTGAAGDRLKEGSNINESLTTLGLVISALADQSAGKNKNKFVPYRDSVLTWLLKDSLGGNSKTAMVATVSPAADNYDETLSTLRYADRAKHIVNNAVVNEDPNARIIRDLREEVEKLREQLTKAEAMKSPELKDRLEESEKLIQEMTVTWEEKLRKTEEIAQERQKQLESLGISLQSSGIKVGDDKCFLVNLNADPALNELLVYYLKEHTLIGSANSQDIQLCGMGILPEHCIIDITSEGQVMLTPQKNTRTFVNGSSVSSPIQLHHGDRILWGNNHFFRLNLPKKKKKAEREDEDQDPSMKNENSSEQLDVDGDSSSEVSSEVNFNYEYAQMEVTMKALGSNDPMQSILNSLEQQHEEEKRSALERQRLMYEHELEQLRRRLSPEKQNCRSMDRFSFHSPSAQQRLRQWAEEREATLNNSLMRLREQIVKANLLVREANYIAEELDKRTEYKVTLQIPASSLDANRKRGSLLSEPAIQVRRKGKGKQIWSLEKLDNRLLDMRDLYQEWKECEEDNPVIRSYFKRADPFYDEQENLSLIGVANVFLESLFYDVKLQYAVPIINQKGEVAGRLHVEVMRLSGDVGERIAGGDEVAEVPFEKETQENKLVCMVKILQATGLPQHLSHFVFCKYSFWDQQEPVIVAPEVDTSSSSVSKEPHCMVVFDHCNEFSVNITEDFIEHLSEGALAIEVYGHKINDPRKNPALWDLGIIQAKTRSLRDRWSEVTRKLEFWVQILEQNENGEYCPVEVISAKDVPTGGIFQLRQGQSRRVQVEVKSVQESGTLPLMEECILSVGIGCVKVRPLRAPRTHETFHEEEEDMDSYQDRDLERLRRKWLNALTKRQEYLDQQLQKLVSKRDKTEDDADREAQLLEMRLTLTEERNAVMVPSAGSGIPGAPAEWTPVPGMETHIPVIFLDLNADDFSSQDNLDDPEAGGWDATLTGEEEEEFFELQIVKQHDGEVKAEASWDSAVHGCPQLSRGTPVDERLFLIVRVTVQLSHPADMQLVLRKRICVNVHGRQGFAQSLLKKMSHRSSIPGCGVTFEIVSNIPEDAQGVEEREALARMAANVENPASADSEAYIEKYLRSVLAVENLLTLDRLRQEVAVKEQLTGKGKLSRRSISSPNVNRLSGSRQDLIPSYSLGSNKGRWESQQDVSQTTVSRGIAPAPALSVSPQNNHSPDPGLSNLAASYLNPVKSFVPQMPKLLKSLFPVRDEKRGKRPSPLAHQPVPRIMVQSASPDIRVTRMEEAQPEMGPDVLVQTMGAPALKICDKPAKVPSPPPVIAVTAVTPAPEAQDGPPSPLSEASSGYFSHSVSTATLSDALGPGLDAAAPPGSMPTAPEAEPEAPISHPPPPTAVPAEEPPGPQQLVSPGRERPDLEAPAPGSPFRVRRVRASELRSFSRMLAGDPGCSPGAEGNAPAPGAGGQALASDSEEADEVPEWLREGEFVTVGAHKTGVVRYVGPADFQEGTWVGVELDLPSGKNDGSIGGKQYFRCNPGYGLLVRPSRVRRATGPVRRRSTGLRLGAPEARRSATLSGSATNLASLTAALAKADRSHKNPENRKSWAS

SEQ ID NO: 1478 - protein, 190 aa, Homo sapiens
MSCQVLQWQKQHQNDLKMLAAKEEQLREFQEEMAALKENLLEDDKEPCCLPQWSVPKDTCRLYRGNDQIMTNLEQWAKQQKVANEKLGNQLREQVNYIAKLSGEKDHLHSVMVHLQQENKKLKKEIEEKKMKAENTRLCTKALGPSRTESTQREKVCGTLGWKGLPQDMGQRMDLTKYIGMPHCPGSSYC

SEQ ID NO: 1479 - protein, 329 aa, Homo sapiens
MATGQKLMRAVRVFEFGGPEVLKLRSDIAVPIPKDHQVLIKVHACGVNPVETYIRSGTYSRKPLLPYTPGSDVAGVIEAVGDNASAFKKGDRVFTSSTISGGYAEYALAADHTVYKLPEKLDFKQGAAIGIPYFTAYRALIHSACVKAGESVLVHGASGGVGLAACQIARAYGLKILGTAGTEEGQKIVLQNGAHEVFNHREVNYIDKIKKYVGEKGIDIIIEMLANVNLSKDLSLLSHGGRVIVVGSRGTIEINPRDTMAKESSIIGVTLFSSTKEEFQQYAAALQAGMEIGWLKPVIGSQYPLEKVAEAHENIIHGSGATGKMILLL

SEQ ID NO: 1480 - protein, 263 aa, Homo sapiens
MFGSSRGGVRGGQDQFNWEDVKTDKQRENYLGNSLMAPVGRWQKGRDLTWYAKGRAPCAGPSREEELAAVREAEREALLAALGYKNVKKQPTGLSKEDFAEVCKREGGDPEEKGVDRLLGLGSASGSVGRVAMSREDKEAAKLGLSVFTHHRVESGGPGTSAASARRKPRAEDQTESSCESHRKSKKEKKKKKKRKHKKEKKKKDKEHRRPAEATSSPTSPERPRHHHHDSDSNSPCCKRRKRGHSGDRRSPSRRWHDRGSEA

SEQ ID NO: 1481 - protein, 1024 aa, Homo sapiens
MAEAPPVSGTFKFNTDAAEFIPQEKKNSGLNCGTQRRLDSNRIGRRNYSSPPPCHLSRQVPYDEISAVHQHSYHPSGSKPKSQQTSFQSSPCNKSPKSHGLQNQPWQKLRNEKHHIRVKKAQSLAEQTSDTAGLESSTRSESGTDLREHSPSESEKEVVGADPRGAKPKKATQFVYSYGRGPKVKGKLKCEWSNRTTPKPEDAGPESTKPVGVFHPDSSEASSRKGVLDGYGARRNEQRRYPQKRPPWEVEGARPRPGRNPPKQEGHRHTNAGHRNNMGPIPKDDLNERPAKSTCDSENLAVINKSSRRVDQEKCTVRRQDPQVVSPFSRGKQNHVLKNVETHTGSLIEQLTTEKYECMVCCELVRVTAPVWSCQSCYHVFHLNCIKKWARSPASQADGQSGWRCPACQNVSAHVPNTYTCFCGKVKNPEWSRNEIPHSCGEVCRKKQPGQDCPHSCNLLCHPGPCPPCPAFMTKTCECGRTRHTVRCGQAVSVHCSNPCENILNCGQHQCAELCHGGQCQPCQIILNQVCYCGSTSRDVLCGTDVGKSDGFGDFSCLKICGKDLKCGNHTCSQVCHPQPCQQCPRLPQLVRCCPCGQTPLSQLLELGSSSRKTCMDPVPSCGKVCGKPLPCGSLDFIHTCEKLCHEGDCGPCSRTSVISCRCSFRTKELPCTSLKSEDATFMCDKRCNKKRLCGRHKCNEICCVDKEHKCPLICGRKLRCGLHRCEEPCHRGNCQTCWQASFDELTCHCGASVIYPPVPCGTRPPECTQTCARVHECDHPVYHSCHSEEKCPPCTFLTQKWCMGKHEFRSNIPCHLVDISCGLPCSATLPCGMHKCQRLCHKGECLVDEPCKQPCTTPRADCGHPCMAPCHTSSPCPVTACKAKVELQCECGRRKEMVICSEASSTYQRIAAISMASKITDMQLGGSVEISKLITKKEVHQARLECDEECSALERKKRLAEAFHISEDSDPFNIRSSGSKFSDSLKEDARKDLKFVSDVEKEMETLVEAVNKVEVETSHWTFL

SEQ ID NO: 1482 - protein, 911 aa, Homo sapiens
MAEKAPPGLNRKTSRSTLSLPPEPVDIIRSKTCSRRVKINVGGLNHEVLWRTLDRLPRTRLGKLRDCNTHESLLEVCDDYNLNENEYFFDRHPGAFTSILNFYRTGKLHMMEEMCALSFGQELDYWGIDEIYLESCCQARYHQKKEQMNEELRREAETMREREGEEFDNTCCPDKRKKLWDLLEKPNSSVAAKILAIVSILFIVLSTIALSLNTLPELQETDEFGQLNDNRQLAHVEAVCIAWFTMEYLLRFLSSPNKWKFFKGPLNVIDLLAILPYYVTIFLTESNKSVLQFQNVRRVVQIFRIMRILRILKLARHSTGLQSLGFTLRRSYNELGLLILFLAMGIMIFSSLVFFAEKDEDATKFTSIPASFWWATITMTTVGYGDIYPKTLLGKIVGGLCCIAGVLVIALPIPIIVNNFSEFYKEQKRQEKAIKRREALERAKRNGSIVSMNLKDAFARSMELIDVAVEKAGESANTKDSADDNHLSPSRWKWARKALSETSSNKSFENKYQEVSQKDSHEQLNNTSSSSPQHLSAQKLEMLYNEITKTQPHSHPNPDCQEKPERPSAYEEEIEMEEVVCPQEQLAVAQTEVIVDMKSTSSIDSFTSCATDFTETERSPLPPPSASHLQMKFPTDLPGTEEHQRARGPPFLTLSREKGPAARDGTLEYAPVDITVNLDASGSQCGLHSPLQSDNATDSPKSSLKGSNPLKSRSLKVNFKENRGSAPQTPPSTARPLPVTTADFSLTTPQHISTILLEETPSQGDRPLLGTEVSAPCQGPSKGLSPRFPKQKLFPFSSRERRSFTEIDTGDDEDFLELPGAREEKQVDSSPNCFADKPSDGRDPLREEGSVGSSSPQDTGHNCRQDIYHAVSEVKKDSSQEGCKMENHLFAPEIHSNPGDTGYCPTRETSM

SEQ ID NO: 1483 - protein, 117 aa, Homo sapiens
MSNKFLGTWKLVSSENFDDYMKALGGVGLATRKLGNLAKPTVIISKKGDIITIRTESTFKNTEISFKLGQEFEETTADNRKTKSIVTLQRGSLNQVQRWDGKETTIKRKLVNGKMVA

SEQ ID NO: 1484 - protein, 968 aa, Homo sapiens [sequence omitted]

SEQ ID NO: 1485 - protein, 782 aa, Homo sapiens [sequence omitted]

SEQ ID NO: 1486 - protein, 1257 aa, Homo sapiens
MKAADEPAYLTVGTDVSAKYRGAFCEAKIKTVKRLVKVKVLLKQDNTTQLVQDDQVKGPLRVGAIVETRTSDGSFQEAIISKLTDASWYTVVFDDGDERTLRRTSLCLKGERHFAESETLDQLPLTNPEHFGTPVIAKKTNRGRRSSLPVTEDEKEEESSEEEDEDKRRLNDELLGKVVSVVSATERTEWYPALVISPSCNDDITVKKDQCLVRSFIDSKFYSIARKDIKEVDILNLPESELSTKPGLQKASIFLKTRVVPDNWKMDISEILESSSSDDEDGPAEENDEEKEKEAKKTEEEVPEEELDPEERDNFLQQLYKFMEDRGTPINKPPVLGYKDLNLFKLFRLVYHQGGCDNIDSGAVWKQIYMDLGIPILNSAASYNVKTAYRKYLYGFEEYCRSANIQFRTVHHHEPKVKEEKKDLEESMEEALKLDQEMPLTEVKSEPEENIDSNSESEREEIELKSPRGRRRIARDVNSIKKEIEEEKTEDKLKDNDTENKDVDDDYETAEKKENELLLGRKNTPKQKEKKIKKQEDSDKDSDEEEEKSQEREETESKCDSEGEEDEEDMEPCLTGTKVKVKYGRGKTQKIYEASIKSTEIDDGEVLYLVHYYGWNVRYDEWVKADRIIWPLDKGGPKKKQKKKAKNKEDSEVDEKRDEERQKSKRGRPPLKSTLSSNMPYGLSKTANSEGKSDSCSSDSETEDALEKNLINEELSLKDELEKNENLNDDKLDEENPKISAHILKENDRTQMQPLETLKLEVGENEQIVQIFGNKMEKTEEVKKEAEKSPKGKGRRSKTKDLSLEIIKISSFGQNEAGSEPHIEAHSLELSSLDNKNFSSATEDEIDQCVKEKKLKRKILGQSSPEKKIRIENGMEMTNTVSQERTSDCIGSEGMKNLNFEQHFERENEGMPSLIAESNQCIQQLTSERFDSPAEETVNIPLKEDEDAMPLIGPETLVCHEVDLDDLDEKDKTSIEDVAVESSESNSLVSIPPALPPVVQHNFSVASPLTLSQDESRSVKSESDITIEVDSIAEESQEGLCERESANGFETNVASGTCSIIVQERESREKGQKRPSDGNSGLMAKKQKRTPKRTSAAAKNEKNGTGQSSDSEDLPVLDNSSKCTPVKHLNVSKPQKLARSPARISPHIKDGEKDKHREKHPNSSPRTYKWSFQLNELDNMNSTERISFLQEKLQEIRKYYMSLKSEVATIDRRRKRLKKKDREVSHAGASMSSASSDTGMSPSSSSPPQNVLAVECR

SEQ ID NO: 1487 - protein, 603 aa, Homo sapiens [sequence omitted]

SEQ ID NO: 1488 - protein, 174 aa, Homo sapiens [sequence omitted]

SEQ ID NO: 1489 - protein, 603 aa, Homo sapiens [sequence omitted]

SEQ ID NO: 1490 - protein, 318 aa, Homo sapiens [sequence omitted]

SEQ ID NO: 1491 - protein, 68 aa, Homo sapiens [sequence omitted]

SEQ ID NO: 1492 - protein, 227 aa, Homo sapiens [sequence omitted]

SEQ ID NO: 1493 - protein, 1028 aa, Homo sapiens
AFLHRIRQNVADSVEKGLTEENVKVLFSNIEDILEVHKDFLAALEYCLHPEPQSQHELGNVFLKFKDKFCVYEEYCSNHEKALRLLVELNKIPTVRAFLLSCMLLGGRKTTDIPLEGYLLSPIQRICKYPLLLKELAKRTPGKHPDHPAVQSALQAMKTVCSNINETKRQMEKLEALEQLQSHIEGWEGSNLTDICTQLLLQGTLLKISAGNIQERAFFLFDNLLVYCKRKSRVTGSKKSTKRTKSINGSLYIFRGRINTEVMEVENVEDGTADYHSNGYTVTNGWKIHNTAKNKWFVCMAKTAEEKQKWLDAIIREREQRESLKLGMERDAYVMIAEKGEKLYHMMMNKKVNLIKDRRRKLSTVPKCFLGNEFVAWLLEIGEISKTEEGVNLGQALLENGIIHHVSDKHQFKNEQVMYRFRYDDGTYKARSELEDIMSKGVRLYCRLHSLYTPVIKDRDYHLKTYKSVLPGSKLVDWLLAQGDCQTREEAVALGVGLCNNGFMHHVLEKSEFRDESQYFRFHADEEMEGTSSKNKQLRNDFKLVENILAKRLLILPQEEDYGFDIEEKNKAVVVKSVQRGSLAEVAGLQVGRKIYSINEDLVFLRPFSEVESILNQSFCSRRPLRLLVATKAKEIIKIPDQPDTLCFQIRGAAPPYVYAVGRGSEAMAAGLCAGQCILKVNGSNVMNDGAPEVLEHFQAFRSRREEALGLYQWIYHTHEDAQEARASQEASTEDPSGEQAQEEDQADSAFPLLSLGPRLSLCEDSPMVTLTVDNVHLEHGVVYEYVSTAGVRCHVLEKIVEPRGCFGLTAKILEAFAANDSVFVENCRRLMALSSAIVTMPHFEFRNICDTKLESIGQRIACYQEFAAQLKSRVSPPFKQAPLEPHPLCGLDFCPTNCHINLMEVSYPKTTPSVGRSFSIRFGRKPSLIGLDPEQGHLNPMSYTQHCITTMAAPSWKCLPAAEGDPQGQGLHDGSFGPASGTLGQEDRGLSFLLKQEDREIQDAYLQLFTKLDVALKEMKQYVTQIN

SEQ ID NO: 1494 - protein, 289 aa, Homo sapiens
MPVDNRNHNEGMVTRCIIEVLSNALSKSSAPPITPECRQVLKTSRKDVKDKETTENENTKFEVRLLRDPADASEAHESSSRGEAGAPGEEDIQGPTKADTEKWAEGGGHSRERADEPQWSLYPSDSQVSEEVKTRHSEKSQREDEEEEEGENYQKGERGEDSSEEKHLEEPGETQNAFLNERKQASAIKKEELVARSETHAAGHSQEKTHSREKSSQESGEETGSQENHPQESKGQPRSQEESEEGEEDATSEVDKRRTRPRHHHGRSRPDRSSQGGSLPSEEKGHPQE

SEQ ID NO: 1495 - protein, 747 aa, Homo sapiens
MFGGPGPGVLGAQGMAGPLRGRVEELKLPWWRESSPLVLRHSEAARLAADALLERGEAAYLRVISEERELPFLSALDVDYMTSHVRGGPELSEAQGQEASGPDRLSLLSEVTSGTYFPMASDIDPPDLDLGWPEVPQATGFSPTQAVVHFQRDKAKNIKDLLRFLFSQAHTVVAVVMDIFTDMELLCDLMEASSRRGVPVYLLLAQEHLRHFLEMCYKMDLNGEHLPNMRVRSTCGDTYCSKAGRRFTGQALEKFVLIDCEQVVAGSYSFTWLCSQAHTSMVLQLRGRIVEDFDREFRCLYAESQPVEGFCGGEDPLSPRALRPPPVALAFRPDVPSPTSSLPSSTSLSSIKQSPLMGRSSYLALPGGGDCSDTGVVSSSLGPARREASGQPSLHRQLSDPNHGSPPGLYRANLGKLGAYPWSQSSPALNHNSTSPLTLAVGSPLLPRSRPLLQFHRGAPALSRFPENGLPGSQEPSPLRGRWVPGTTLETVEEKEKKASPSQSRGQLDLLVPFPRAREVGDPDSGVTPNSGPLRPGEQAPEDRRLSPSQADSQLDLLSRALGTGGAPELGSLRPGDRALEDRRLSLNQSRGQSDLLMQYPKAQGSRVPLETNSSARPARRAPDERRQTLGHSQLDLITKFGPFRGEGPGPNGLPISSPARTAGAGSGDEKRLTLGHSKLDLITKYHQLHGARQGTEPGGPKGGHLNGGNSDLVRDEKRLTLGHSKLDLITKYNKSKFKQLRSRFES

SEQ ID NO: 1496 - protein, 254 aa, Homo sapiens [sequence omitted]

SEQ ID NO: 1497 - protein, 325 aa, Homo sapiens
MVSPATRKSLPKVKAMDFITSTAILPLLFGCLGVFGLFRLLQWVRGKAYLRNAVVVITGATSGLGKECAKVFYAAGAKLVLCGRNGGALEELIRELTASHATKVQTHKPYLVTFDLTDSGAIVAAAAEILQCFGYVDILVNNAGISYRGTIMDTTVDVDKRVMETNYFGPVALTKALLPSMIKRRQGHIVAISSIQGKMSIPFRSAYAASKHATQAFFDCLRAEMEQYEIEVTVISPGYIHTNLSVNAITADGSRYGVMDTTTAQGRSPVEVAQDVLAAVGKKKKDVILADLLPSLAVYLRTLAPGLFFSLMASRARKERKSKNS

SEQ ID NO: 1498 - protein, 378 aa, Homo sapiens
MVLLWLTLLLIALPCLLQTKEDPNPPITNLRMKAKAQQLTWDLNRNVTDIECVKDADYSMPAVNNSYCQFGAISLCEVTNYTVRVANPPFSTWILFPENSGKPWAGAENLTCWIHDVDFLSCSWAVGPGAPADVQYDLYLNVANRRQQYECLHYKTDAQGTRIGCRFDDISRLSSGSQSSHILVRGRSAAFGIPCTDKFVVFSQIEILTPPNMTAKCNKTHSFMHWKMRSHFNRKFRYELQIQKRMQPVITEQVRDRTSFQLLNPGTYTVQIRARERVYEFLSAWSTPQRFECDQEEGANTRAWRTSLLIALGTLLALVCVFVICRRYLVMQRLFPRIPHMKDPIGDSFQNDKLVVWEAGKAGLEECLVTEVQVVQKT

SEQ ID NO: 1499 - protein, 3312 aa, Homo sapiens
MMARRPPWRGLGERSTPILLLLLLSLFPLSQEELGGGGHQGWDPGLAATTGPRAHIGGGALALCPESSGVREDGGPGLGVREPIFVGLRGRRQSARNSRGPPEQPNEELGIEHGVQPLGSRERETGQGPGSVLYWRPEVSSCGRTGPLQRGSLSPGALSSGVPGSGNSSPLPSDFLIRHHGPKPVSSQRNAGTGSRKRVGTARCCGELWATGSKGQGERATTSGAERTAPRRNCLPGASGSGPELDSAPRTARTAPASGSAPRESRTAPEPAPKRMRSRGLFRCRFLPQRPGPRPPGLPARPEARKVTSANRARFRRAANRHPQFPQYNYQTLVPENEAAGTAVLRVVAQDPDAGEAGRLVYSLAALMNSRSLELFSIDPQSGLIRTAAALDRESMERHYLRVTAQDHGSPRLSATTMVAVTVADRNDHSPVFEQAQYRETLRENVEEGYPILQLRATDGDAPPNANLRYRFVGPPAARAAAAAAFEIDPRSGLISTSGRVDREHMESYELVVEASDQGQEPGPRSATVRVHITVLDENDNAPQFSEKRYVAQVREDVRPHTVVLRVTATDRDKDANGLVHYNIISGNSRGHFAIDSLTGEIQVVAPLDFEAEREYALRIRAQDAGRPPLSNNTGLASIQVVDINDHIPIFVSTPFQVSVLENAPLGHSVIHIQAVDADHGENARLEYSLTGVAPDTPFVINSATGWVSVSGPLDRESVEHYFFGVEARDHGSPPLSASASVTVTVLDVNDNRPEFTMKEYHLRLNEDAAVGTSVVSVTAVDRDANSAISYQITGGNTRNRFAISTQGGVGLVTLALPLDYKQERYFKLVLTASDRALHDHCYVHINITDANTHRPVFQSAHYSVSVNEDRPMGSTIVVISASDDDVGENARITYLLEDNLPQFRIDADSGAITLQAPLDYEDQVTYTLAITARDNGIPQKADTTYVEVMVNDVNDNAPQFVASHYTGLVSEDAPPFTSVLQISATDRDAHANGRVQYTFQNGEDGDGDFTIEPTSGIVRTVRRLDREAVSVYELTAYAVDRGVPPLRTPVSIQVMVQDVNDNAPVFPAEEFEVRVKENSIVGSVVAQITAVDPDEGPNAHIMYQIVEGNIPELFQMDIFSGELTALIDLDYEARQEYVIVVQATSAPLVSRATVHVRLVDQNDNSPVLNNFQILFNNYVSNRSDTFPSGIIGRIPAYDPDVSDHLFYSFERGNELQLLVVNQTSGELRLSRKLDNNRPLVASMLVTVTDGLHSVTAQCVLRVVIITEELLANSLTVRLENMWQERFLSPLLGRFLEGVAAVLATPAEDVFIFNIQNDTDVGGTVLNVSFSALAPRGAGAGAAGPWFSSEELQEQLYVRRAALAARSLLDVLPFDDNVCLREPCENYMKCVSVLRFDSSAPFLASASTLFRPIQPIAGLRCRCPPGFTGDFCETELDLCYSNPCRNGGACARREGGYTCVCRPRFTGEDCELDTEAGRCVPGVCRNGGTCTDAPNGGFRCQCPAGGAFEGPRCEVAARSFPPSSFVMFRGLRQRFHLTLSLSFATVQQSGLLFYNGRLNEKHDFLALELVAGQVRLTYSTGESNTVVSPTVPGGLSDGQWHTVHLRYYNKPRTDALGGAQGPSKDKVAVLSVDDCDVAVALQFGAEIGNYSCAAAGVQTSSKKSLDLTGPLLLGGVPNLPENFPVSHKDFIGCMRDLHIDGRRVDMAAFVANNGTMAGCQAKLHFCDSGPCKNSGFCSERWGSFSCDCPVGFGGKDCQLTMAHPHHFRGNGTLSWNFGSDMAVSVPWYLGLAFRTRATQGVLMQVQAGPHSTLLCQLDRGLLSVTVTRGSGRASHLLLDQVTVSDGRWHDLRLELQEEPGGRRGHHVLMVSLDFSLFQDTMAVGSELQGLKVKQLHVGGLPPGSAEEAPQGLVGCIQGVWLGSTPSGSPALLPPSHRVNAEPGCVVTNACASGPCPPHADCRDLWQTFSCTCQPGYYGPGCVDACLLNPCQNQGSCRHLPGAPHGYTCDCVGGYFGHHCEHRMDQQCPRGWWGSPTCGPCNCDVHKGFDPNCNKTNGQCHCKEFHYRPRGSDSCLPCDCYPVGSTSRSCAPHSGQCPCRPGALGRQCNSCDSPFAEVTASGCRVLYDACPKSLRSGVWWPQTKFGVLATVPCPRGALGAAVRLCDEAQGWLEPDLFNCTSPAFRELSLLLDGLELNKTALDTMEAKKLAQRLREVTGHTDHYFSQDVRVTARLLAHLLAFESHQQGFGLTATQDAHFNENLLWAGSALLAPETGDLWAALGQRAPGGSPGSAGLVRHLEEYAATLARNMELTYLNPMGLVTPNIMLSIDRMEHPSSPRGARRYPRYHSNLFRGQDAWDPHTHVLLPSQSPRPSPSEVLPTSSSIENSTTSSVVPPPAPPEPEPGISIIILLVYRTLGGLLPAQFQAERRGARLPQNPVMNSPVVSVAVFHGRNFLRGILESPISLEFRLLQTANRSKAICVQWDPPGLAEQHGVWTARDCELVHRNGSHARCRCSRTGTFGVLMDASPRERLEGDLELLAVFTHVVVAVSVAALVLTAAILLSLRSLKSNVRGIHANVAAALGVAELLFLLGIHRTHNQLVCTAVAILLHYFFLSTFAWLFVQGLHLYRMQVEPRNVDRGAMRFYHALGWGVPAVLLGLAVGLDPEGYGNPDFCWISVHEPLIWSFAGPVVLVIVMNGTMFLLAARTSCSTGQREAKKTSALTLRSSFLLLLLVSASWLFGLLAVNHSILAFHYLHAGLCGLQGLAVLLLFCVLNADARAAWMPACLGRKAAPEEARPAPGLGPGAYNNTALFEESGLIRITLGASTVSSVSSARSGRTQDQDSQRGRSYLRDNVLVRHGSAADHTDHSLQAHAGPTDLDVAMFHRDAGADSDSDSDLSLEEERSLSIPSSESEDNGRTRGRFQRPLCRAAQSERLLTHPKDVDGNDLLSYWPALGECEAAPCALQTWGSERRLGLDTSKDAANNNQPDPALTSGDETSLGRAQRQRKGILKNRLQYPLVPQTRGAPELSWCRAATLGHRAVPAASYGRIYAGGGTGSLSQPASRYSSREQLDLLLRRQLSRERLEEAPAPVLRPLSRPGSQECMDAAPGRLEPKDRGSTLPRRQPPRDYPGAMAGRFGSRDALDLGAPREWLSTLPPPRRTRDLDPQPPPLPLSPQRQLSRDPLLPSRPLDSLSRSSNSREQLDQVPSRHPSREALGPLPQLLRAREDSVSGPSHGPSTEQLDILSSILASFNSSALSSVQSSSTPLGPHTTATPSATASVLGPSTPRSATSHSISELSPDSEVPRSEGHS

SEQ ID NO: 1500 - protein, 409 aa, Homo sapiens
ADSSGRGAGKPATGPTNSSSAKKKDKRVQGGRVIESPYLQYEKKTTQKAPAGDGSQTRGKMSEGGRKSSLLQKSKADSSGVRKGDLQSTLLEGHGTAPPDLDLSAINDKSIVKKTPQLAKTISKKPESTSFSAPRKKSPDLSEAMEMMESQTLLLTLLSVKMENNLAEFERRAEKNLLIMCKEKEKLQKKAHELKRRLLLSQRKRELADVLDAQIEMLSPFEAVATRFKEQYRTFATALDTTRHELPVRSIHLEGDGQQLLDALQHELVTTQRLLGELDVGDSEENVQVLDLLSELKDVTAKKDLELRRSFAQVLELSAEASKEAALANQEVWEETQGMAPPSRWYFNQDSACRESGGAPKNTPLSEDDNPGASSAPAQATFISPSEDFSSSSQAEVPPSLSRSGRDLS

SEQ ID NO: 1501 - protein, 334 aa, Homo sapiens
HEAPCDHMAYAVNCQVITWQRIISHFDIFAFGHFWGWAMKALLIRSYGLCWTISITWELTELFFMHLLPNFAECWWDQVILDILLCNGGGIWLGMVVCRFLEMRTYHWASFKDIHTTTGKIKRAVLQFTPASWTYVRWFDPKSSFQRVAGVYLFMIIWQLTELNTFFLKHIFVFQASHPLSWGRILFIGGITAPTVRQYYAYLTDTQCKRVGTQCWVFGVIGFLEAIVCIKFGQDLFSKTQILYVVLWLLCVAFTTFLCLYGMIWYAEHYGHREKTYSECEDGTYSPEISWHHRKGTKGSEDSPPKHAGNNESHSSRRRNRHSKSKVTNGVGKK

SEQ ID NO: 1502 - protein, 900 aa, Homo sapiens
SRGLSSLFTVVPCLSCHTAAPGMSASTSGSGPEPKPQPQPVPEPERGPLSEQVSEAVSEAVPRSEPVSETTSEPEPGAGQPSELLQGSRPGSESSSGVGAGPFTKAASEPLSRAVGSATFLRPESGSLPALKPLPLLRPGQAKTPLGVPMSGTGTTSSAPLALLPLDSFEGWLLKWTNYLKGYQRRWFVLGNGLLSYYRNQGEMAHTCRGTINLSTAHIDTEDSCGILLTSGARSYHLKASSEVDRQQWITALELAKAKAVRVMNTHSDDSGDDDEATTPADKSELHHTLKNLSLKLDDLSTCNDLIAKHGAALQRSLTELDGLKIPSESGEKLKVVNERATLFRITSNAMINACRDFLELAEIHSRKWQRALQYEQEQRVHLEETIEQLAKQHNSLERAFHSAPGRPANPSKSFIEGSLLTPKGEDSEEDEDTEYFDAMEDSTSFITVITEAKEDSRKAEGSTGTSSVDWSSADNVLDGASLVPKGSSKVKRRVRIPNKPNYSLNLWSIMKNCIGRELSRIPMPVNFNEPLSMLQRLTEDLEYHHLLDKAVHCTSSVEQMCLVAAFSVSSYSTTVHRIAKPFNPMLGETFELDRLDDMGLRSLCEQVSHHPPSAAHYVFSKHGWSLWQEITISSKFRGKYISIMPLGAIHLEFQASGNHYVWRKSTSTVHNIIVGKLWIDQSGDIEIVNHKTNDRCQLKFLPYSYFSKEAARKVTGVVSDSQGKAHYVLSGSWDEQMECSKVMHSSPSSPSSDGKQKTVYQTLSAKLLWKKYPLPENAENMYYFSELALTLNEHEEGVAPTDSRLRPDQRLMEKGRWDEANTEKQRLEEKQRLSRRRRLEACGPGSSCSSEEEKEADAYTPLWFEKRLDPLTGEMACVYKGGYWEAKEKQDWHMCPNIF

SEQ ID NO: 1503 - protein, 421 aa, Homo sapiens
MAATLILEPAGRCCWDEPVRIAVRGLAPEQPVTLRASLRDEKGALFQAHARYRADTLGELDLERAPALGGSFAGLEPMGLLWALEPEKPLVRLVKRDVRTPLAVELEVLDGHDPDPGRLLCQTRHERYFLPPGVRREPVRVGRVRGTLFLPPEPGPFPGIVDMFGTGGGLLEYRASLLAGKGFAVMALAYYNYEDLPKTMETLHLEYFEEAMNYLLSHPEVKGPGVGLLGISKGGELCLSMASFLKGITAAVVINGSVANVGGTLRYKGETLPPVGVNRNRIKVTKDGYADIVDVLNSPLEGPDQKSFIPVERAESTFLFLVGQDDHNWKSEFYANEACKRLQAHGRRKPQIICYPETGHYIEPPYFPLCRASLHALVGSPIIWGGEPRAHAMAQVDAWKQLQTFFHKHLGGREGTIPSKV

SEQ ID NO: 1504 - protein, 2406 aa, Homo sapiens
MDPEQSVKGTKKAEGSPRKRLTKGEAIQTSVSSSVPYPGSGTAPTQESPAQELLAPQPFPGPSSVLREGSQEKTGQQQKPPKRPPIEASVHISHVPQHPLTPAFMSPGKPEHLLEGSTWQLVSPMRLGPSGSLLAPGLHPQSQLLPSHASIIPPEDLPGVPKVFVPRPSQVSLKPTEEAHKKERKPQKPGKYICQYCSRPCAKPSVLQKHIRSHTGERPYPCGPCGFSFKTKSNLYKHRKSHAHRIKAGLASGMGGEMYPHGLEMERIPGEEFEEPTEGESTDSEEETSATSGHPAELSPRPKQPLLSSGLYSSGSHSSSHERCSLSQSSTAQSLEDPPPFVEPSSEHPLSHKPEDTHTIKQKLALRLSERKKVIDEQAFLSPGSKGSTESGYFSRSESAEQQVSPPNTNAKSYAEIIFGKCGRIGQRTAMLTATSTQPLLPLSTEDKPSLVPLSVPRTQVIEHITKLITINEAVVDTSEIDSVKPRRSSLSRRSSMESPKSSLYREPLSSHSEKTKPEQSLLSLQHPPSTAPPVPLLRSHSMPSAACTISTPHHPFRGSYSFDDHITDSEALSRSSHVFTSHPRMLKPQPAIELPLGGEYSSEEPGPSSKDTASKPSDEVEPKESELTKKTKKGLKTKGVIYECNICGARYKKRDNYEAHKKYYCSELQIAKPISAGTHTSPEAEKSQIEHEPWSQMMHYKLGTTLELTPLRKRRKEKSLGDEEEPPAFESTKSQFGSPGPSDAARNLPLESTKSPAEPSKSVPSLEGPTGFQPRTPKPGSGSESGKERRTTSKEISVIQHTSSFEKSDSLEQPSGLEGEDKPLAQFPSPPPAPHGRSAHSLQPKLVRQPNIQVPEILVTEEPDRPDTEPEPPPKEPEKTEEFQWPQRSQTLAQLPAEKAPPKKKRLRLAEMAQSSGESSFESSVPLSRSPSQESNVSLSGSSRSASFERDDHGKAEAPDPSSDMRPKPLGTHMLTVPSHHPHAREMRRSASEQSPNVSHSAHMTETRSKSFDYGSLSLTGPSAPAPVAPPAGEAPPERRKCFLVRSPSLSRPPESELEVAPKGRQESEEPQPSSSKPSAKSSLSQISSAATSHGGPPGGKGPGQDRPALGPTVPYTEALQVFHHPVAQTPLHEKPYLPPPVSLFSFQHLVQHEPGQSPEFFSTQAMSSLLSSPYSMPPLPPSLFQAPPLPLQPTVLHPGQLHLPQLMPHPANIPFRQPPSFLPMPYPTSSALSSGFFLPLQSQFALQLPGDVESHLPQIKTSLAPLATGSAGLSPSQEYSSDIRLPPVAPPASSSAPTSAPPLALPACPDTMVSLVVPVRVQTNMPSYGSAMYTTLSQILVTQSQGSSATVALPKFEEPPSKGTTVCGADVHEVGPGPSGLSEEQSRAFPTPYLRVPVTLPERKGTSLSSESILSLEGSSSTAGGSKRVLSPAGSLELTMETQQQKRVKEEEASKADEKLELVKPCSVVLTSTEDGKRPEKSHLGNQGQGRRELEMLSSLSSDPSDTKEIPPLPHPALSHGQAPGSEALKEYPQPSGKPHRRGLTPLSVKKEDSKEQPDLPSLAPPSSLPLSETSSRPAKSQEGTDSKKVLQFPSLHTTTNVSWCYLNYIKPNHIQHADRRSSVYAGWCISLYNPNLPGVSTKAALSLLRSKQKVSKETYTMATAPHPEAGRLVPSSSRKPRMTEVHLPSLVSPEGQKDLARVEKEEERRGEPEEDAPASQRGEPARIKIFEGGYKSNEEYVYVRGRGRGKYVCEECGIRCKKPSMLKKHIRTHTDVRPYVCKHCHFAFKTKGNLTKHMKSKAHSKKCQETGVLEELEAEEGTSDDLFQDSEGREGSEAVEEHQFSDLEDSDSDSDLDEDEDEDEEESQDELSRPSSEAPPPGPPHALRADSSPILGPQPPDAPASGTEATRGSSVSEAERLTASSCSMSSQSMPGLPWLGPAPLGSVEKDTGSALSYKPVSPRRPWSPSKEAGSRPPLARKHSLTKNDSSPQRCSPAREPQASAPSPPGLHVDPGRGMGPLPCGSPRLQLSPLTLCPLGRELAPRAHVLSKLEGTTDPGLPRYSPTRRWSPGQAESPPRSAPPGKWALAGPGSPSAGEHGPGLGLAPRVLFPPAPLPHKLLSRSPETCASPWQKAESRSPSCSPGPAHPLSSRPFSALHDFHGHILARTEENIFSHLPLHSQHLTRAPCPLIPIGGIQMVQARPGAHPTLLPGPTAAWVSGFSGGGSDLTGAREAQERGRWSPTESSSASVSPVAKVSKFTLSSELEGRDYPKERERTGGGPGRPPDWTPHGTGAPAEPTPTHSPCTPPDTLPRPPQGRRAAQSWSPRLESPRAPANPEPSATPPLDRSSSVGCLAEASARFPARTRNLSGESRTRQDSPKPSGSGEPRAHPHQPEDRVPPNA

SEQ ID NO: 1505 - protein, 557 aa, Homo sapiens
MRRLTRRLVLPVFGVLWITVLLFFWVTKRKLEVPTGPEVQTPKVWSLFFKVAGMSPWAPQVPVSPTPPYQRGHLPTGGHLAVCHFPCLLQEAQFHLQTQVFLQVRCTLLVYCTDLPPTSIIITFHNEARSTLLRTIRSVLNRTPTHLIREIILVDDFSNDPDDCKQLIKLPKVKCLRNNERQGLVRSRIRGADIAQGTTLTFLDSHCEVNRDWLQPLLHRVKEDYTRVVCPVIDIINLDTFTYIESASELRGGFDWSLHFQWEQLSPEQKARRLDPTEPIRTPIIAGGLFVIDKAWFDYLGKYDMDMDIWGGENFEISFRVWMCGGSLEIVPCSRVGHVFRKKHPYVFPDGNANTYIKNTKRTAEVWMDEYKQYYYAARPFALERPFGNVESRLDLRKNLRCQSFKWYLENIYPELSIPKESSIQKGNIRQRQKCLESQRQNNQETPNLKLSPCAKVKGEDAKSQVWAFTYTQQILQEELCLSVITLFPGAPVVLVLCKNGDDRQQWTKTGSHIEHIASHLCLDTDMFGDGTENGKEIVVNPCESSLMSQHWDMVSS

SEQ ID NO: 1506 - protein, 665 aa, Homo sapiens
MTSANKAIELQLQVKQNAEELQDFMRDLENWEKDIKQKDMELRRQNGVPEENLPPIRNGNFRKKKKGKAKESSKKTREENTKNRIKSYDYEAWAKLDVDRILDELDKDDSTHESLSQESESEEDGIHVDSQKALVLKEKGNKYFKQGKYDEAIDCYTKGMDADPYNPVLPTNRASAYFRLKKFAVAESDCNLAVALNRSYTKAYSRRGAARFALQKLEEAKKDYERVLELEPNNFEATNELRKISQALASKENSYPKEADIVIKSTEGERKQIEAQQNKQQAISEKDRGNGFFKEGKYERAIECYTRGIAADGANALLPANRAMAYLKIQKYEEAEKDCTQAILLDGSYSKAFARRGTARTFLGKLNEAKQDFETVLLLEPGNKQAVTELSKIKKELIEKGHWDDVFLDSTQRQNVVKPIDNPPHPGSTKPLKKVIIEETGNLIQTIDVPDSTTAAAPENNPINLANVIAATGTTSKKNSSQDVLFPTSDTPRAKVLKIEEVSDTSSLQPQASLKQDVCQSYSEKMPIEIEQKPAQFATTVLPPIPANSFQLESDFRQLKSSPDMLYQYLKQIEPSLYPKLFQKNLDPDVFNQIVKILHDFYIEKEKPLLIFEILQRLSELKRFDMAVMFMSETEKKIARALFNHIDKSGLKDSSVEELKKRYGG

SEQ ID NO: 1507 - protein, 390 aa, Homo sapiens
MPEGPELHLASQFVNEACRALVFGGCVEKSSVSRNPEVPFESSAYRISASARGKELRLILSPLPGAQPQQEPLALVFRFGMSGSFQLVPREELPRHAHLRFYTAPPGPRLALCFVDIRRFGRWDLGGKWQPGRGPCVLQEYQQFRESVLRNLADKAFDRPICEALLDQRFFNGIGNYLRAEILYRLKIPPFEKARSVLEALQQHRPSPELTLSQKIRTKLQNPDLLELCHSVPKEVVQLGGRGYGSESGEEDFAAFRAWLRCYGMPGMSSLQDRHGRTIWFQGDPGPLAPKGRKSRKKKSKATQLSPEDRVEDALPPSKAPSRTRRAKRDLPKRTATQRPEGTSLQQDPEAPTVPKKGRRKGRQAASGHCRPRKVKADIPSLEPEGTSAS

SEQ ID NO: 1508 - protein, 554 aa, Homo sapiens [sequence omitted]

SEQ ID NO: 1509 - protein, 415 aa, Homo sapiens
MKLSLTKVVNGCRLGKIKNLGKTGDHTMDIPGCLLYTKTGSAPHLTHHTLHNIHGVPAMAQLTLSSLAEHHEVLTEYKEGVGKFIGMPESLLYCSLHDPVSPCPAGYVTNKSVSVWSVAGRVEMTVSKFMAIQKALQPDWFQCLSDGEVSCKEATSIKRVRKSVDRSLLFLDNCLRLQEESEVLQKSVIIGVIEGGDVMEERLRSARETAKRPVGGFLLDGFQGNPTTLEARLRLLSSVTAELPEDKPRLISGVSRPDEVLECIERGVDLFESFFPYQVTERGCALTFSFDYQPNPEETLLQQNGTQEEIKCMDQIKKIETTGCNQEITSFEINLKEKKYQEDFNPLVRGCSCYCCKNHTRAYIHHLLVTNELLAGVLLMMHNFEHYFGFFHYIREALKSDKLAQLKELIHRQAS

SEQ ID NO: 1510 - protein, 520 aa, Homo sapiens
MRSPEGYLRGNMSENEEEEISQQEGSGDYEVEEIPFGLEPQSPGFEPQSPEFEPQSPRFEPESPGFESRSPGLVPPSPEFAPRSPESDSQSPEFESQSPRYEPQSPGYEPRSPGYEPRSPGYESESSRYESQNTELKTQSPEFEAQSSKFQEGAEMLLNPEEKSPLNISVGVHPLDSFTQGFGEQPTGDLPIGPPFEMPTGALLSTPQFEMLQNPLGLTGALRGPGRRGGRARGGQGPRPNICGICGKSFGRGSTLIQHQRIHTGEKPYKCEVCSKAFSQSSDLIKHQRTHTGERPYKCPRCGKAFADSSYLLRHQRTHSGQKPYKCPHCGKAFGDSSYLLRHQRTHSHERPYSCTECGKCYSQNSSLRSHQRVHTGQRPFSCGICGKSFSQRSALIPHARSHAREKPFKCPECGKRFGQSSVLAIHARTHLPGRTYSCPDCGKTFNRSSTLIQHQRSHTGERPYRCAVCGKGFCRSSTLLQHHRVHSGERPYKCDDCGKAFSQSSDLIRHQRTHAAGRR

SEQ ID NO: 1511 - protein, 590 aa, Homo sapiens
MLSLKQLLSFLSITDFQLPDEDFGPLKLEKVKSCSEKPVEPFESKMFGERHLKEGSCIFPEELSPKRMDTEMEDLEEDLIVLPGKSHPKRPNSQSQHTKTGLSSSILLYTPLNTVAPDDNDRPTTDMCSPAFPILGTTPAFGPQGSYEKASTEVAGRTCCTPQLAHLKDSVCLASDTKQFDSSGSPAKPHTTLQVSGRQGQPTCDCDSVPPGTPPPIESFTFKENQLCRNTCQELHKHSVEQTETAELPASDSINPGNLQLVSELKNPSGSCSVDVSAMFWERAGCKEPCIITACEDVVSLWKALDAWQWEKLYTWHFAEVPVLQIVPVPDVYNLVCVALGNLEIREIRALFCSSDDESEKQVLLKSGNIKAVLGLTKRRLVSSSGTLSDQQVEVMTFAEDGGGKENQFLMPPEETILTFAEVQGMQEALLGTTIMNNIVIWNLKTGQLLKKMHIDDSYQASVCHKAYSEMGLLFIVLSHPCAKESESLRSPVFQLIVINPKTTLSVGVMLYCLPPGQAGRFLEGDVKDHCAAAILTSGTIAIWDLLLGQCTALLPPVSDQHWSFVKWSGTDSHLLAGQKDGNIFVYHYS

SEQ ID NO: 1512 - protein, 207 aa, Homo sapiens
MKCTLVRGDSSPRQAELKSGPASRPALEKPHPHEEATTLPEEAPSNDERTPEEEAPPNEQRPLREEVLPKEGVASKEEVTLKEELPPKEEVAPKEEVPPIERAFAQKTRPIKPPPDSQETLALPSLVPQNYTENKNEGVDVTSLRGEVESLRRALELMEVQLERKLTDIWEELKSEKEQRRRLEVQVMQGTQKSQTPRVIHTQTQTY

SEQ ID NO: 1513 - protein, 221 aa, Homo sapiens
MAAARPSLGRVLPGSSVLFLCDMQEKFRHNIAYFPQIVSVAARMLKVARLLEVPVMLTEQYPQGLGPTVPELGTEGLRPLAKTCFSMVPALQQELDSRPQLRSVLLCGIEAQACILDPRSYPGLALTSLYPQNTTLDLLDRGLQVHVVVDACSSRSQVDRLVALARMRQSGAFLSTSEGLILQLVGDAVHPQFKEIQKLIKEPAPDSGLLGLFQGQNSLLH

SEQ ID NO: 1514 - protein, 607 aa, Homo sapiens
MIFAREVISRNGLQILGTIIEDGDDLGEVLALSLRAFSELMEHGVVSWETLSIPFVRKVVCYVNMNLMDASVPPLALGLLESVTLSSPALGQLVKSEVPLDRLLVHLQVMNQQLQTKAMALLTALLQGASPVERKHMLDYLWQRNLRQFIYKNIIHSAAPMGDEMAHHLYVLQALMLGLLEPRMRTPLDPYSQEQREQLQVLRQAAFEVEGESSGAGLSADRRRSLCAREFRKLGFSNSNPAQDLERVPPGLLALDNMLYFSRNAPSAYSRFVLENSSREDKHECPFARGSIQLTVLLCELLRVGEPCSETAQDFSPMFFGQDQSFHELFCVGIQLLNKTWKEMRATQEDFDKVMQVVREQLARTLALKPTSLELFRTKVNALTYGEVLRLRQTERLHQEGTLAPPILELREKLKPELMGLIRQQRLLRLCEGTLFRKISSRRRQDKLWFCCLSPNHKLLQYGDMEEGASPPTLESLPEQLPVADMRALLTGKDCPHVREKGSGKQNKDLYELAFSISYDRGEEEAYLNFIAPSKREFYLWTDGLSALLGSPMGSEQTRLDLEQLLTMETKLRLLELENVPIPERPPPVPPPPTNFNFCYDCSIAEP

SEQ ID NO: 1515 - protein, 321 aa, Homo sapiens
MAADVTGKSDPFCVVELNNDRLLTHTVYKNLNPEWNKVFTFNIKDIHSVLEVTVYDEDRDRSADFLGKVAIPLLSIQNGEQKAYVLKNRQLTGPTKGVIYLEIDVIFNAVKASLRTLIPKEQKYIEEENRLSKQLLLRNFIRMKRCVMVLVNAAYYVNSCFDWDSPPRSLAAFVVVEDMLEDEEEEDDKDDKDSEKKGFINKIYAIQEVCVSVQNILDEVASFGERIKSTFNWTVPFLSWLAIVALCVFTAILYCIPLRYIVLVWGINKFTKKLRSPYAIDNNELLDFLSRVPSDVQVVQYQELKPDPSHSPYKRKKNNLG

SEQ ID NO: 1516 - protein, 363 aa, Homo sapiens
MRQELKNLKLAVDRERERPVKAGKKKDKKGKKGKKKEKKAKKDKDLTADRTIESLYKELVEEGLLIQALKVNLSDYIGEYSYLGTTLRQVSIEPMPSLLDVRQLITLYGIWPLGSAAVHEKAPLVKSLLLAGPSGVGKKMLVHAICTETGANLFNLSSSNIAGKYPGKNGLQMMLHAVFKVARQLQPSVVWIEDTEKTFYKKVPNAEKMNEPKRLKKHLPQILKLLKPDDRILIVGTTRRPFDAELQSFCKVYQKIILVPRPDYASRYVLWKQIIERNGGVLTSALNVSCLAKVTDGFTQGHIVEVVKGVLTDQRIRRQIHKPLTAVEFITAITSMNPVYKEEEESFKNWYAKTPLGKNVPWR

SEQ ID NO: 1517 - protein, 613 aa, Homo sapiens
MGEAFYTVKLERLESCDTAGLSFQEVQKNTYDFECQWKDDEGNYKTVLMLQKENLPGRRAQRDRRAAGNRHIENQLGVSFQSHLPELQQFQREGKIYEYNQVEKSPNNRGKHYKCDECGKVFSQNSRLTSHKRIHTGEKPYQCNKCGKAFTVRSNLTIHQVIHTGEKPYKCNECGKVFSQPSNLAGHQRIHTGEKPYKCNECGKAFRAHSKLTTHQVIHTGEKPYKCKECGKCFTQNSHLASHRRIHTGEKPYKCNECGKAFSVRSSLTTHQTIHTGEKPYKCNECGKVFRHNSYLAKHRRIHTGEKPYKCNECGKAFSMHSNLTKHQIIHTGEKPFKCNECVKVFTQYSHLANHRRIHTGEKPYRCDECGKAFSVRSSLTTHQAIHTGEKPYKCNDCGKVFTQNSHLASHRGIHSGEKPYKCDECGKAFSQTSQLARHWRVHTGEKPYKCNECGKAFSVHSSLTIHQTIHTGQKPYKCNDCGKVFRHNSYLAIHQRIHTGEKPYKCNECGKAFSVHSNLATHQVIHTGEKPYKCNECGKVFTQNSHLANHRRIHTGEKPYRCNECGKAFSVRSTLTTHMAIHTGDKPYKCNQCGKVFTQNSNLAKHRRIHSG

SEQ ID NO: 1518 - protein, 825 aa, Homo sapiens
MAADEGSAEKQAGEAHMAADGETNGSCENSDASSHANAAKHTQDSARVNPQDGTNTLTRIAENGVSERDSEAAKQNHVTADDFVQTSVIGSNGYILNKPALQAQPLRTTSTLASSLPGHAAKTLPGGAGKGRTPSAFPQTPAAPPATLGEGSADTEDRKLPAPGADVKVHRARKTMPKSVVGLHAASKDPREVREARDHKEPKEEINKNISDFGRQQLLPPFPSLHQSLPQNQCYMATTKSQTACLPFVLAAAVSRKKKRRMGTYSLVPKKKTKVLKQRTVIEMFKSITHSTVGSKGEKDLGASSLHVNGESLEMDSDEDDSEELEEDDGHGAEQAAAFPTEDSRTSKESMSEADRAQKMDGESEEEQESVDTGEEEEGGDESDLSSESSIKKKFLKRKGKTDSPWIKPARKRRRRSRKKPSGALGSESYKSSAGSAEQTAPGDSTGYMEVSLDSLDLRVKGILSSQAEGLANGPDVLETDGLQEVPLCSCRMETPKSREITTLANNQCMATESVDHELGRCTNSVVKYGLMRPSNKAPLLVLCEDHRGRMVKHQCCPGCGYFCTAGNFMECQPESSISHRFHKDCASRVNNASYCPHCGEESSKAKEVTIAKADTTSTVTPVPGQEKGSALEGRADTTTGSAAGPPLSEDDKLQGAASHVPEGFDPTGPAGLGRPTPGLSQGPGKETLESALIALDSEKPKKLRFHPKQLYFSARQGELQKVLLMLVDGIDPNFKMEHQNKRSPLHAAAEAGHVDICHMLVQAGANIDTCSEDQRTPLMEAAENNHLEAVKYLIKAGALVDPKIQKTSKVYTESQETQRSQTIL

SEQ ID NO: 1519 - protein, 507 aa, Homo sapiens
MKHKRKNLQPFFIVLWNGGDLLMIISKKRWSWGGSAMANSESKTANKRSASTEKLEQGTSALIRQMPLSSAGLQNSVAKRKTDKERSSSLNRRDSNLHSSTDKEQAERKPRVTGVTNYVMQYVTVPLRKCTSDELRAVMFPMSTMKIPPQTKVEESPLEKVETPPKASVDAPPQVNVEVFCNTSMEASPKAGVGMAPEVSTDSFPVVSVDVSPVVSTYDSEMSMDASPELSIEALPKVDLETVPKVSIVASPEASLEAPPEVSLEALPEVSVEAAPEGSLEAPPKGSAEVAPKESVKGSPKESMEASPEAMVKASPKTSLEASMEASPKAKARDAPKKSEMDKQALIPIAKKRLSSYTECYKWSSSPENACGLPSPISTNRQIQKNCPPSPLPLISKQSPQTSFPYKIMPIQHTLSVQSASSTVKKKKETVSKTTNRCEALSQRHMIYEESGNKSTAGIMNAEAATKILTELRRLADDGGRRRSWRWRQPILERAAGTDGCCSKRDC

SEQ ID NO: 1520 - protein, 325 aa, Homo sapiens [sequence omitted]

SEQ ID NO: 1521 - protein, 801 aa, Homo sapiens
MKAFRQPASDALKNGVKKSSDKQKDLNEKCLYEVGRDDNSKKIMENSGIQMVSKNGNLQLHTDKGSFLKEKDKKLKKKNKKTLDTGAIPGKNREGNTQKKETTFFLKEKQYQNRMSLRQRKTEFFKSSTLFNNESLVYEDIANDDLLKVSSLCNNNKLSRKTSIPVKDIKLTQSKAESEASLLNVSTPKSTRRSGRISSTPTTETIRGIDSDDVQDNSQLKASTQKAANLSEKHSLYTAELITVPFDSESPIRMKFTRISTPKKSKKKSNKRSEKSEATDGGFTSQIRKASNTSKNISKAKQLIEKAKALHISRSKVTEEIAIPLRRSSRHQTLPERKKLSETEDSVIIIDSSPTALKHPEKNQKKLQCLNDVLGKKLNTSTKNVPGKMKVAPLFLVRKAQKAADPVPSFDESSQDTSEKSQDCDVQCKAKRDFLMSGLPDLLKRQIAKKAAALDVYNAVSTSFQRVVHVQQKDDGCCLWHLKPPSCPLLTKFKELNTKVIDLSKCGIALGEFSTLNSKLKSGNSAAVFMRTRKEFTEEVRNLLLEEIRWSNPEFSLKKYFPLLLKKQIEHQVLSSECHSKQELEADVSHKETKRKLVEAENSKSKRKKPNEYSKNLEKTNRKSEELSKRNNSSGIKLDSSKDSGTEDMLWTEKYQPQTASELIGNELAIKKLHSWLKDWKRRAELEERQNLKGKRDEKHEDFSGGIDFKGSSDDEEESRLCNTVLITGPTGVGKTAAVYACAQELGFKIFEVNASSQRSGRQILSQLKEATQSHQVDKQGVNSQKPCFFNSYYIGKSPSK

SEQ ID NO: 1522 - protein, 463 aa, Homo sapiens
MVPALRYLVGACGRARGLFAGGSPGACGFASGRPRPLCGGSRSASTSSFDIVIVGGGIVGLASARALILRHPSLSIGVLEKEKDLAVHQTGHNSGVIHSGIYYKPESLKAKLCVQGAALLYEYCQQKGISYKQCGKLIVAVEQEEIPRLQALYEKGLQNGVPGLRLIQQEDIKKKEPYCRGLMAIDCPHTGIVDYRQVALSFAQDFQEAGGSVLTNFEVKGIEMAKESPSRSIDGMQYPIVIKNTKGEEIRCQYVVTCAGLYSDRISELSGCTPDPRIVPFRGDYLLLKPEKCYLVKGNIYPVPDSRFPFLGVHFTPRMDGSIWLGPNAVLAFKREGYRPFDFSATDVMDIIINSGLIKLASQNFSYGVTEMYKACFLGATVKYLQKFIPEITISDILRGPAGVRAQALDRDGNLVEDFVFDAGVGDIGNRILHVRNAPSPAATSSIAISGMIADEVQQRFEL

SEQ ID NO: 1523 - protein, 228 aa, Homo sapiens
MVCPPGEVPVFWPSPLTSLGAVSSCETPLAFASIPGCTVMTDLKDAKAPPGCLTPERIPEVHHISQDPLHYSIASVSASQKIRELESMIGIDPGNRGIGHLLCKDELLKASLSLSHARSVLITTGFPTHFNHEPPVETDGPPGAVALVAFLQALEKEVAIIVDQRAWNLHQKIVEDAVEQGVLKTQIPILTYQGGSVEAAQAFLCKNGDPQTPRFDHLVAIEQCRKSC

SEQ ID NO: 1524 - protein, 487 aa, Homo sapiens
MQEFARRYFRRSQALLGQTDGGAAGKDTDSLVQYTKAPIQESLLSLSDDVSKLAVASFLALMRFMGDQSKPRGKDEMDLLYELLKLCQQEKLRDEIYCQVIKQVTGHPRPEHCTRGWSFLSLLTGFFPPSTRLMPYLTKFLQDSGPSQELARSSQEHLQRTVKYGGRRRMPPPGEMKAFLKGQAIRLLLIHLPGGVDYRTNIQTFTVAAEVQEELCRQMGITEPQEVQEFALFLIKEKSQLVRPLQPAECLNSVVVDQDVSLHSRRLHWETPLHFDNSTYISTHYSQVLWDYLQGKLPVSAKADAQLARLAALQHLSKANRNTPSGQDLLAYVPKQLQRQVNTASIKNLMGQELRRLEGHSPQEAQISFIEAMSQLPLFGYTVYGVLRVSMQALSGPTLLGLNRQHLILMDPSSQSLYCRIALKSLQRLHLLSPLEEKGPPGLEVNYGSADNPQTIWFELPQAQELLYTTVFLIDSSASCTEWPSIN

SEQ ID NO: 1525 - protein, 135 aa, Homo sapiens
MDALLGTGPRRARGCLGAAGPTSSGRAARTPAAPWARFSAWLECVCVVTFDLELGQALEVSGRERGRGRVGRAAPLGASPASLGALGRPALSLAFGRRLLEGPLLRAPEALPRPRREGELLGVGSCLHIGMEHFA

SEQ ID NO: 1526 - protein, 147 aa, Homo sapiens
MNESWAGPGPAERAEEAVSGVGVEAKTQHAGQGAQPGGMGCGFSSGPIGMALGLGLVGTAATRGGSSAWPDSTCNVGRQWAPPGGRNTVRSMQRAGDHGACDLRAHPGQTWVRGGLGRQDGEGLQGVFVLCPYTGDLHGRVRSIRML

SEQ ID NO: 1527 - protein, 377 aa, Homo sapiens
MDPAARVVRALWPGGCALAWRLGGRPQPLLPTQSRAGFAGAAGGPSPVAAARKGSPRLLGAAALALGGALGLYHTARWHLRAQDLHAERSAAQLSLSSRLQLTLYQYKTCPFCSKVRAFLDFHALPYQVVEVNPVRRAEIKFSSYRKVPILVAQEGESSQQLNDSSVIISALKTYLVSGQPLEEIITYYPAMKAVNEQGKEVTEFGNKYWLMLNEKEAQQVYGGKEARTEEMKWRQWADDWLVHLISPNVYRTPTEALASFDYIVREGKFGAVEGAVAKYMGAAAMYLISKRLKSRHRLQDNVREDLYEAADKWVAAVGKDRPFMGGQKPNLADLAVYGVLRVMEGLDAFDDLMQHTHIQPWYLRVERAITEASPAH

SEQ ID NO: 1528 - protein, 526 aa, Homo sapiens
MPAVSLPPKENALFKRILRCYEHKQYRNGLKFCKQILSNPKFAEHGETLAMKGLTLNCLGKKEEAYELVRRGLRNDLKSHVCWHVYGLLQRSDKKYDEAIKCYRNALKWDKDNLQILRDLSLLQIQMRDLEGYRETRYQLLQLRPAQRASWIGYAIAYHLLEDYEMAAKILEEFRKTQQTSPDKVDYEYSELLLYQNQVLREAGLYREALEHLCTYEKQICDKLAVEETKGELLLQLCRLEDAADVYRGLQERNPENWAYYKGLEKALKPANMLERLKIYEEAWTKYPRGLVPRRLPLNFLSGEKFKECLDKFLRMNFSKGCPPVFNTLRSLYKDKEKVAIIEELVVGYETSLKSCRLFNPNDDGKEEPPTTLLWVQYYLAQHYDKIGQPSIALEYINTAIESTPTLIELFLVKAKIYKHAGNIKEAARWMDEAQALDTADRFINSKCAKYMLKANLIKEAEEMCSKFTREGTSAVENLNEMQCMWFQTECAQAYKAMNKFGEALKKCHEIERKSLMTSLTFIHTV

SEQ ID NO: 1529 - protein, 284 aa, Homo sapiens
MVEFAPLFMPWERRLQTLAVLQFVFSFLALAEICTVGFIALLFTRFWLLTVLYAAWWYLDRDKPRQGGRHIQAIRCWTIWKYMKDYFPISLVKTAELDPSRNYIAGFHPHGVLAVGAFANLCTESTGFSSIFPGIRPHLMMPTLWFRAPFFRDYIMSAGLVTSEKESAAHILNRKGGGNLLGIIVGGAQEALDARPGSFTLLLRNRKGFVRLALTHGYQASGKSTLGSVGNWQGFYFGGKMAETNADSILVEIFSPFTIKIIFWCLMPKYLEKFPQRRLSDLRN

SEQ ID NO: 1530 - protein, 179 aa, Homo sapiens
MVVGAFPMAKLLYLGIRQVSKPLANRIKEAARRSEFFKTYICLPPAQLYHWVEMRTKMRIMGFRGTVIKPLNEEAAAELGAELLGEATIFIVGGGCLVLEYWRHQAQQRHKEEEQRAAWNALRDEVGHLALALEALQAQVQAAPPQGALEELRTELQEVRAQLCNPGRSASHAVPASKK

SEQ ID NO: 1531 - protein, 615 aa, Homo sapiens
MAVYVGMLRLGRLCAGSSGVLGARAALSRSWQEARLQGVRFLSSREVDRMVSTPIGGLSYVQGCTKKHLNSKTVGQCLETTAQRVPEREALVVLHEDVRLTFAQLKEEVDKAASGLLSIGLCKGDRLGMWGPNSYAWVLMQLATAQAGIILVSVNPAYQAMELEYVLKKVGCKALVFPKQFKTQQYYNVLKQICPEVENAQPGALKSQRLPDLTTVISVDAPLPGTLLLDEVVAAGSTRQHLDQLQYNQQFLSCHDPINIQFTSGTTGSPKGATLSHYNIVNNSNILGERLKLHEKTPEQLRMILPNPLYHCLGSVAGTMMCLMYGATLILASPIFNGKKALEAISRERGTFLYGTPTMFVDILNQPDFSSYDISTMCGGVIAGSPAPPELIRAIINKINMKDLVVAYGTTENSPVTFAHFPEDTVEQKAESVGRIMPHTEARIMNMEAGTLAKLNTPGELCIRGYCVMLGYWGEPQKTEEAVDQDKWYWTGDVATMNEQGFCKIVGRSKDMIIRGGENIYPAELEDFFHTHPKVQEVQVVGVKDDRMGEEICACIRLKDGEETTVEEIKAFCKGKISHFKIPKYIVFVTNYPLTISGKIQKFKLREQMERHLNL

SEQ ID NO: 1532 - protein, 289 aa, Homo sapiens
MVCGRQLSGAGSETLKQRRTQIMSRGLPKQKPIEGVKQVIVVASGKGGVGKSTTAVNLALALAANDSSKAIGLLDVDVYGPSVPKMMNLKGNPELSQSNLMRPLLNYGIACMSMGFLVEESEPVVWRGLMVMSAIEKLLRQVDWGQLDYLVVDMPPGTGDVQLSVSQNIPITGAVIVSTPQDIALMDAHKGAEMFRRVHVPVLGLVQNMSVFQCPKCKHKTHIFGADGARKLAQTLGLEVLGDIPLHLNIREASDTGQPIVFSQPESDEAKAYLRIAVEVVRRLPSPSE

SEQ ID NO: 1533 - protein, 501 aa, Homo sapiens
MKKEGRKRWKRKEDKKRVVVSNLLFEGWSHKENPNRHHRGNQIKTSKYTVLSFVPKNIFEQLHRFANLYFVGIAVLNFIPVVNAFQPEVSMIPICVILAVTAIKDAWEDLRRYKSDKVINNRECLIYSRKEQTYVQKCWKDVRVGDFIQMKCNEIVPADILLLFSSDPNGICHLETASLDGETNLKQRRVVKGFSQQEVQFEPELFHNTIVCEKPNNHLNKFKGYMEHPDQTRTGFGCESLLLRGCTIRNTEMAVGIVIYAGHETKAMLNNSGPRYKRSKIERRMNIDIFFCIGILILMCLIGAVGHSIWNGTFEEHPPFDVPDANGSFLPSALGGFYMFLTMIILLQVLIPISLYVSIELVKLGQVFFLSNDLDLYDEETDLSIQCRALNIAEDLGQIQYIFSDKTGTLTENKMVFRRCTIMGSEYSHQENGIEAPKGSIPLSKRKYPALLRNEEIKDILLALLEAVWHFHKLLPVSLWSSLSQIRAVPITCKLSFVYKG

SEQ ID NO: 1534 - protein, 251 aa, Homo sapiens
MKIRREVVEHVEPLRPYESLDTLKQFLQYHGKILCFFCLWDDSVSMFGDRRELILHYFLCDDTIEIKELLPHSSGRDALKMFLRRSKLPKNCPPRVYQPGQITDRAVLNSYGDFIKNQADGYLFDRYKLGKVDQEFYKDSDLSLGVTINVWGRKVLLYDCDEFTKSYYKSKYGIENFTSVSCKPPSPPPKIERKFPPYNGFGSEEDSLRNCIDLKPTPHRRNFKKFMEKDSYGSKSNILRFFCKTSHRQMC

SEQ ID NO: 1535 - protein, 202 aa, Homo sapiens
MSASTSSHRPIKGILKNKSSSGSSVATSGQQSGGTIQDVKRKKSQKWDESSILAAHRATYRDYDLMKANEPGTSYMSVQDNGEDSVRDVEGEDSVRGVEGKEATDASDHSCEVDEQESSEAYMRKILLHKQEKKRQFEMRRRLHYNEELNIKLARQLMWKELQSEDNENEETPQGTNEEKTAAEESEEAPLTGGLQTQSCDP

SEQ ID NO: 1536 - protein, 244 aa, Homo sapiens
MAAAASPAFLLCLPLLHLLSGWSRAGWVDTHCLCYDFIITPKSRPEPQWCEVQGLVDERPFLHYDCVNHKAKAFASLGKKVNVTKTWEEQTETLRDVVDFLKGQLLDIQVENLIPIEPLTLQARMSCEHEAHGHGRGSWQFLFNGQKFLLFDSNNRKWTALHPGAKKMTEKWEKNRDVTMFFQKISLGDCKMWLEEFLMYWEQMLDPTKPPSLAPGTTQPKAMATTLSPWSLLIIFLCFILAGR

SEQ ID NO: 1537 - protein, 441 aa, Homo sapiens
MKKFFQEFKADIKFKSAGPGQKLKESVGEKAHKEKPNQPAPRPPRQGPTNEAQMAAAAALARLEQKQSRAWGPTSQDTIRNQVRKELQAEATVSGSPEAPGTNVVSEPREEGSAHLAVPGVYFTCPLTGATLRKDQRDACIKEAILLHFSTDPVAASIMKIYTFNKDQDRVKLGVDTIAKYLDNIHLHPEEEKYRKIKLQNKVFQERINCLEGTHEFFEAIGFQKVLLPAQDQEDPEEFYVLSETTLAQPQSLERHKEQLLAAEPVRAKLDRQRRVFQPSPLASQFELPGDFFNLTAEEIKREQRLRSEAVERLSVLRTKAMREKEEQRGLRKYNYTLLRVRLPDGCLLQGTFYARERLGAVYGFVREALQSDWLPFELLASGGQKLSEDENLALNECGLVPSALLTFSWDMAVLEDIKAAGAEPDSILKPELLSAIEKLL

SEQ ID NO: 1538 - protein, 605 aa, Homo sapiens
  VARIANT 604: Xaa = Any Amino Acid
MQCCGLVHRRRVRVSYGSADSYTSRPSDSDVSLEEDREAVRREAERQAQAQLEKAKTKPVAFAVRTNVSYSAAHEDDVPVPGMAISFEAKDFLHVKEKFNNDWWIGRLVKEGCEIGFIPSPVKLENMRLQHEQRAKQGKFYSSKSGGNSSSSLGDIVPSSRKSTPPSSAIDIDATGLDAEENDIPANHRSPKPSANSVTSPHSKEKRMPFFKKTEHTPPYDVVPSMRPVVLVGPSLKGYEVTDMMQKALFDFLKHRFEGRISITRVTADISLAKRSVLNNPSKHAIIERSNTRSSLAEVQSEIERIFELARTLQLVVLDADTINHPAQLSKTSLAPIIVYVKISSPKVLQRLIKSRGKSQAKHLNVQMVAADKLAQCPPELFDVILDENQLEDACEHLADYLEAYWKATHPPSSSLPNPLLSRTLATSSLPLSPTLASNSQGSQGDQRTDRSAPIRSASQAEEEPSVEPVKKSQHRSSSSAPHHNHRSGTSRGLSRQETFDSETQESRDSAYVEPKEDYSHDHVDHYASHRDHNHRDETHGSSDHRHRESRHRSRDVDREQDHNECNKQRSRHKSKDRYCEKDGEVISKKRNEAGEWNRDVYIXQ

SEQ ID NO: 1539 - protein, 571 aa, Homo sapiens
MAARWSSENVVVEFRDSQATAMSVDCLGQHAVLSGRRFLYIVNLDAPFEGHRKISRQSKWDIGAVQWNPHDSFAHYFAASSNQRVDLYKWKDGSGEVGTTLQGHTRVISDLDWAVFEPDLLVTSSVDTYIYIWDIKDTRKPTVALSAVAGASQVKWNKKNANCLATSHDGDVRIWDKRKPSTAVEYLAAHLSKIHGLDWHPDSEHILATSSQDNSVKFWDYRQPRKYLNILPCQVPVWKARYTPFSNGLVTVMVPQLRRENSLLLWNVFDLNTPVHTFVGHDDVVLEFQWRKQKEGSKDYQLVTWSRDQTLRMWRVDSQMQRLCANDILDGVDEFIESISLLPEPEKTLHTEDTDHQHTASHGEEEALKEDPPRNLLEERKSDQLGLPQTLQQEFSLINVQIRNVNVEMDAADRSCTVSVHCSNHRVKMLVKFPAQYPNNAAPSFQFINPTTITSTMKAKLLKILKDTALQKVKRGQSCLEPCLRQLVSCLESFVNQEDSASSNPFALPNSVTPPLPTFARVTTAYGSYQDANIPFPRTSGARFCGAGYLVYFTRPMTMHRAVSPTEPTPR

SEQ ID NO: 1540 - protein, 122 aa, Homo sapiens
PMFIVNTNVPRASVPDGFLSELTQQLAQATGKPPQYIAVHVVPDQLMAFGGSSEPCALCSLHSIGKIGGAQNRSYSKLLCGLLAERLRISPDRVYINYYDMNAANVGWNNSTFALEHHHHHH

SEQ ID NO: 1541 - protein, 795 aa, Homo sapiens [sequence omitted]

SEQ ID NO: 1542 - protein, 1654 aa, Homo sapiens
GWEHRHFRSWSRHCRRHFVSVEKEASVAAGSGRRSPARRRRFIPEVPPVSSPIPPPRSACGEAGAAREPGRGRGVGREAGYPERLQLQLQRTSEGGRGAMSEQTPAEAGAAGAREDACRDYQSSLEDLTFNSKPHINMLTILAEENLPFAKEIVSLIEAQTAKAPSSEKLPVMYLMDSIVKNVGREYLTAFTKNLVATFICVFEKVDENTRKSLFKLRSTWDEIFPLKKLYALDVRVNSLDPAWPIKPLPPNVNTSSIHVNPKFLNKSPEEPSTPGTVVSSPSISTPPIVPDIQKNLTQEQLIRQQLLAKQKQLLELQQKKLELELEQAKAQLAVSLSVQQETSNLGPGSAPSKLHVSQIPPMAVKAPHQVPVQSEKSRPGPSLQIQDLKGTNRDPRLNRISQHSHGKDQSHRKEFLMNTLNQSDTKTSKTIPSEKLNSSKQEKSKSGEKITKKELDQLDSKSKSKSKSPSPLKNKLSHTKDLKNQESESMRLSDMNKRDPRLKKHLQDKTDGKDDDVKEKRKTAEKKDKDEHMKSSEHRLAGSRNKIINGIVQKQDTITEESEKQGTKPGRSSTRKRSRSRSPKSRSPIIHSPKRRDRRSPKRRQRSMSPTSTPKAGKIRQSGAKQSHMEEFTPPSREDRNAKRSTKQDIRDPRRMKKTEEERPQETTNQHSTKSGTEPKENVENWQSSKSAKRWKSGWEENKSLQQVDEHSKPPHLRHRESWSSTKGILSPRAPKQQQHRLSVDANLQIPKELTLASKRELLQKTSERLASGEITQDDFLVVVHQIRQLFQYQEGVREEQRSPFNDRFPLKRPRYEDSDKPFVDSPASRFAGLDTNQRLTALAEDRPLFDGPSRPSVARDGPTKMIFEGPNKLSPRIDGPPTPASLRFDGSPGQMGGGGPLRFEGPQGQLGGGCPLRFEGPPGPVGTPLRFEGPIGQAGGGGFRFEGSPGLRFEGSPGGLRFEGPGGQPVGGLRFEGHRGQPVGGLRFEGPHGQPVGGLRFDNPRGQPVGGLRFEGGHGPSGAAIRFDGPHGQPGGGIRFEGPLLQQGVGMRFEGPHGQSVAGLRFEGQHNQLGGNLRFEGPHGQPGVGIRFEGPLVQQGGGMRFEGPSVPGGGLRIEGPLGQGGPRFEGCHALRFDGQPGQPSLLPRFDGLHGQPGPRFERTPGQPGPQRFDGPPGQQVQPRFDGVPQRFDGPQHQQASRFDIPLGLQGTRFDNHPSQRLESVSFNQTGPYNDPPGNAFNAPSQGLQFQRHEQIFDSPQGPNFNGPHGPGNQSFSNPLNRASGHYFDEKNLQSSQFGNFGNIPAPMTVGNIQASQQVLSGVAQPVAFGQGQQFLPVHPQNPGFVQNPSGALPKAYPDNHLSQVDVNELFSKLLKTGILKLSQTDSATTQVSEVTAQPPPEEEEDQNEDQDVPDLTNFTVEELKQRYDSVINRLYTGIQCYSCGMRFTTSQTDVYADHLDWHYRQNRTEKDVSRKVTHRRWYYSLTDWIEFEEIADLEERAKSQFFEKVHEEVVLKTQEAAKEKEFQSVPAGPAGAVESCEICQEQFEQYWDEEEEEWHLKNAIRVDGKIYHPSCYEDYQNTSSFDCTPSPSKTPVENPLNIMLNIVKNELQEPCDSPKVKEERIDTPPACTEESIATPSEIKTENDTVESV

SEQ ID NO: 1543 - protein, 914 aa, Homo sapiens
MSSPEHNQPPVALLDTEEMSVPQDCHLLPSTESFSGGVSEDVISRPHSPPEIVSREESPQCSENQSSPMGLEPPMSLGKAEDNQSISAEVESGDTQELNVDPLLKESSTFTDENPSETEESEAAGGIGKLEGEDGDVKCLSEKDTYDTSIDSLEENLDKKKKGKKFPEASDRCLRSQLSDSSSADRCLRNQSSDSSSACLEIKVPKNPSAKRSKKEGHPGGTTPKGLLPDSFHTETLEDTEKPSVNERPSEKDAEQEGEGGGIITRQTLKNMLDKEVKGLRGEIFPSRDPITTAGQPLPGERLEIYVQSKMDEKNAHIPSESIACKRDPEQAKEEPGHIPTQHVEEAVNEVDNENTQQKDDESDAPCSSLGLSSSGSGDAARAPKSVPRPKRLTSSTYNLRHAHSLGSLDASKVTSEKEAAQVNPIMPKENGASESGDPLDEDDVDTVVDEQPKFMEWCAEEENQELIANFNAQYMKVQKGWIQLEKEGQPTPRARNKSDKLKEIWKSKKRSRKCRSSLESQKCSPVQMLFMTNFKLSNVCKWFLETTETRSLVIVKKLNTRLPGGVPPVKHPLQKYAPSSLYPSSLQAERLKKHLKKFPGATPAKNNWKMQKLWAKFRENPDQVEPEDGSDVSPGPNSEDSIEEVKEDRNSHPPANLPTPASTRILRKYSNIRGKLRAQQRLIKNEKMECPDALAVESKPSRKSVCINPLMSPKLALQVDADGFPVKPKSTEGMKGRKGKQVSEILPKAEVQSKRKRTEGSSPPDSKNKGPTVKASKEKHADGATKTPAAKRPAARDRSSQPPKKTSLKENKVKIPKKSAGKSCPPSRKEKENTNKRPSQSIASETLTKPAKQKGAGESSSRPQKATNRKQSSGKTRARPSTKTPESSAAQRKRKLKAKLDCSHSKRRRLDAK

SEQ ID NO: 1544 - protein, 491 aa, Homo sapiens
MASRCWRWWGWSAWPRTRLPPAGSTPSFCHHFSTQEKTPQICVVGSGPAGFYTAQHLLKHPQAHVDIYEKQPVPFGLVRFGVAPDHPEVKNVINTFTQTAHSGRCAFWGNVEVGRDVTVPELQEAYHAVVLSYGAEDHRALEIPGEELPGVCSARAFVGWYNGLPENQELEPDLSCDTAVILGQGNVALDVARILLTPPEHLERTDITKAALGVLRQSRVKTVWLVGRRGPLQVAFTIKELREMIQLPGARPILDPVDFLGLQDKIKEVPRPRKRLTELLLRTATEKPGPAEAARQASASRAWGLRFFRSPQQVLPSPDGRRAAGVRLAVTRLEGVDEATRAVPTGDMEDLPCGLVLSSIGYKSRPVDPSVPFDSKLGVIPNVEGRVMDVPGLYCSGWVKRGPTGVIATTMTDSFLTGQMLLQDLKAGLLPSGPRPGYAAIQALLSSRGVRPVSFSDWEKLDAEEVARGQGTGKPREKLVDPQEMLRLLGH

SEQ ID NO: 1545 - protein, 686 aa, Homo sapiens
MAAAQEADGARSAVVAAGGGSSGQVTSNGSIGRDPPAETQPQNPPAQPAPNAWQVIKGVLFRIFIIWAISSWFRRGPAPQDQAGPGGAPRVASRNLFPKDTLMNLHVYISEHEHFTDFNATSALFWEQHDLVYGDWTSGENSDGCYEHFAELDIPQSVQQNGSIYIHVYFTKSGFHPDPRQKALYRRLATVHMSRMINKYKRRRFQKTKNLLTGETEADPEMIKRAEDYGPVEVISHWHPNITINIVDDHTPWVKGSVPPPLDQYVKFDAVSGDYYPIIYFNDYWNLQKDYYPINESLASLPLRVSFCPLSLWRWQLYAAQSTKSPWNFLGDELYEQSDEEQDSVKVALLETNPYLLALTIIVSIVHSVFEFLAFKNDIQFWNSRQSLEGLSVRSVFFGVFQSFVVLLYILDNETNFVVQVSVFIGVLIDLWKITKVMDVRLDREHRVAGIFPRLSFKDKSTYIESSTKVYDDMAFRYLSWILFPLLGCYAVYSLLYLEHKGWYSWVLSMLYGFLLTFGFITMTPQLFINYKLKSVAHLPWRMLTYKALNTFIDDLFAFVIKMPVMYRIGCLRDDVVFFIYLYQRWIYRVDPTRVNEFGMSGEDPTAAAPVAEVPTAAGALTPTPAPTTTTATREEASTSLPTKPTQGASSASEPQGLFVEALSVPLSLCVSSHLALPAQHHWESW

SEQ ID NO: 1546 - protein, 157 aa, Homo sapiens
ARGLFISRNRQFSYLIENMARDCGEYAHTRYFRGGMLTNARLLFGPTVRLPDLIIFLHTLNNIFEPHVAVRDAAKMNIPTVGIVDTNCNPCLITYPVPGNDDSPLAVHLYCRLFQTAITRAKEKRQQVEALYRLQGQKEPGDQGPAHPPGADMSHSL

SEQ ID NO: 1547 - protein, 177 aa, Homo sapiens
MGRACTITSPASRSCAGSRGARNSRRFPTFTNTSASPLKTKRTSGQKAEAQARKWISLSVRLKKVSSKAQSRMSAYARLSARSRARQWVRAPSPTSSAPPEPAPLGTPSKNTRRTSAPCTRPSAPHVWRTAWRRSKSSATDLTAISRSGRPPGAPSPRHLCGWLMSSGNRRWSLARK

SEQ ID NO: 1548 - protein, 517 aa, Homo sapiens
SKLGLLDNHSSEFNVTRNYLDWLTSIPWGKYSNENLDLARAQAVLEEDHYGMEDVKKRILEFIAVSQLRGSTQGKILCFYGPPGVGKTSIARSIARALNREYFRFSVGGMTDVAEIKGHRRTYVGAMPGKIIQCLKKTKTENPLILIDEVDKIGRGYQGDPSSALLELLDPEQNANFLDHYLDVPVDLSKVLFICTANVTDTIPEPLRDRMEMINVSGYVAQEKLAIAERYLVPQARALCGLDESKAKLSSDVLTLLIKQYCRESGVRNLQKQVEKVLRKSAYKIVSGEAESVEVTPENLQDFVGKPVFTVERMYDVTPPGVVMGLAWTAMGGSTLFVETSLRRPQDKDAKGDKDGSLEVTGQLGEVMKESARIAYTFARAFLMQHAPANDYLVTSHIHLHVPEGATPKDGPSAGCTIVTALLSLAMGRPVRQNLAMTGEVSLTGKILPVGGIKEKTIAAKRAGVTCIVLPAENKKDFYDLAAFITEGLEVHFVEHYREIFDIAFPDEQAEALAVER

SEQ ID NO: 1549 - protein, 170 aa, Homo sapiens
IAMRRDRGPKPALGGAGEVEPGGMAASPTGRPRRLQRYLQSGEFDQFRDFPIFESNFVQVTRLGEVANEVTMGVAASSPALELPDLLLLAGPAKENGHLQLFGLFPLKFVQLFVHDKSRCQLEVKLNTSRTFYLQLRAPLKTRDREFGQWVRLLYRLRFLSASAVPFTQE

SEQ ID NO: 1550 - protein, 298 aa, Homo sapiens
FETTDESLRSHFEQWGTLTDCVVMRDPNTKRSRGFGFVTYATVEEVDAAMNARPHKVDGRVVEPKRAVSREDSQRPGAHLTVKKIFVGGIKEDTEEHHLRDYFEQYGKIEVIEIMTDRGSGKKRGFAFVTFDDHDSVDKIVIQKYHTVNGHNCEVRKALSKQEMASASSSQRGRSGSGNFGGGRGGGFGGNDNFGRGGNFSGRGGFGGSRGGGGYGGSGDGYNGFGNDGSNFGGGGSYNDFGNYNNQSSNFGPMKGGNFGGRSSGPYGGGGQYFAKPRNQGGYGGSSSSSSYGSGRRF

SEQ ID NO: 1551 - protein, 87 aa, Homo sapiens
MQARGFGSDQSENVDRGAGSIREAGGAFGKREQAEEERYFRAQSREQLAALKKHHEEEIVHHKKEIERLQKEIERHKQKIKMLKHDD

SEQ ID NO: 1552 - protein, 162 aa, Homo sapiens
WEPSGAAVSRSPLSPPSRPFASREPAGFRAALADPPGMPRYELALILKAMQRPETAATLKRTIEALMDRGAIVRDLENLGERALPYRISAHSQQHNRGGYFLVDFYAPTAAVESMVEHLSRDIDVIRGNIVKHPLTQELKECEGIVPVPLAEKLYSTKKRKK

SEQ ID NO: 1553 - protein, 558 aa, Homo sapiens
MAALTRDPQFQKLQQWYREHRSELNLRRLFDANKDRFNHFSLTLNTNHGHILVDYSKNLVTEDVMRMLVDLAKSRGVEAARERMFNGEKINYTEGRAVLHVALRNRSNTPILVDGKDVMPEVNKVLDKMKSFCQRVRSGDWKGYTGKTITDVINIGIGGSDLGPLMVTEALKPYSSGGPRVWYVSNIDGTHIAKTLAQLNPESSLFIIASKTFTTQETITNAETAKEWFLQAAKDPSAVAKHFVALSTNTTKVKEFGIDPQNMFEFWDWVGGRYSLWSAIGLSIALHVGFDNFEQLLSGAHWMDQHFRTTPLEKNAPVLLALLGIWYINCFGCETHAMLPYDQYLHRFAAYFQQGDMESNGKYITKSGTRVDHQTGPIVWGEPGTNGQHAFYQLIHQGTKMIPCDFLIPVQTQHPIRKGLHHKILLANFLAQTEALMRGKSTEEARKELQAAGKSPEDLERLLPHKVFEGNRPTNSIVFTKLTPFMLGALVAMYEHKIFVQGIIWDINSFDQWGVELGKQLAKKIEPELDGSAQVTSHDASTNGLINFIKQQREARVQ

SEQ ID NO: 1554 - protein, 484 aa, Homo sapiens
MDLGKDQSHLKHHQTPDPHQEENHSPEVIGTWSLRNRELLRKRKAEVHEKETSQWLFGEQKKRKQQRTGKGNRRGRKRQQNTELKVEPQPQIEKEIVEKALAPIEKKTEPPGSITKVFPSVASPQKVVPEEHFSEICQESNIYQENFSEYQEIAVQNHSSETCQHVSEPEDLSPKMYQEISVLQDNSSKICQDMKEPEDNSPNTCQVISVIQDHPFKMYQDMAKREDLAPKMCQEAAVPKILPCPTSEDTADLAGCSLQAYPKPDVPKGYILDTDQNPAEPEEYNETDQGIAETEGLFPKIQEIAEPKDLSTKTHQESAEPKYLPHKTCNEIIVPKAPSHKTIQETPHSEDYSIEINQETPGSEKYSPETYQEIPGLEEYSPEIYQETSQLEEYSPEIYQETPGPEDLSTETYKNKDVPKECFPEPHQETGGPQGQDPKAHQEDAKDAYTFPQEMKEKPKEEPGIPAILNESHPENDVYSYVLF

SEQ ID NO: 1555 - protein, 305 aa, Homo sapiens
MASRQPEVPALEASAPLGKMSLPIGIYRRAVSYDDTLEDPAPMTPPPSDMGSVPWRPVIPERKYQHLAKVEEGEASLPSPAMTLSSAIDSVDKVPVVKAKATHVIMNSLITKQTQESIQHFERQAGLRDAGYTPHKGLTTEETKYLRVAEALHKLKLQSGEVTKEERQPASAQSTPSTTPHSSPKQRPRGWFTSGSSTALPGPNPSTMDSGSGDKDRNLSDKWSLFGPRSLQKYDSGSFATQAYRGAQKPSPLELIRAQANRMAEDPAALKPPKMDIPVMEGKKQPPRAHNLKPRDLNVLTPTGF

SEQ ID NO: 1556 - protein, 167 aa, Homo sapiens
MNVVKASPQSALLLYISELIQEKNPMNAMNVVKPSARKYASYNMRDVIQERLPLYVPSAENPIHTNMASLPIREFTQERNLMSAMNVERPSPQSQYSMYIKERIQERGRMDAVIVRKPSPTYQTLSNIRKCTQEKWVESVKLKTPVMESHSSFLISELMQKKTLLVP

SEQ ID NO: 1557 - protein, 1011 aa, Homo sapiens
MVATLLSYGAVIEVQNKASLTPLLLAIQKRSKQTVEFLLTKNANANAFNESKCTALMLAICEGSSEIVGMLLQQNVDVFAEDIHGITAERYAAARGVNYIHQQLLEHIRKLPKNPQNTNPEGTSTGTPDEAAPLAERTPDTAESLLEKTPDEAARLVEGTSAKIQCLGKATSGKFEQSTEETPRKILRPTKETSEKFSWPAKERSRKITWEEKETSVKTECVAGVTPNKTEVLEKGTSNMIACPTKETSTKASTNVDVSSVEPIFSLFGTRTIENSQCTKVEEDFNLATKIISKSAAQNYTCLPDATYQKDIKTINHKIEDQMFPSESKREEDEEYSWDSGSLFESSAKTQVCIPESMYQKVMEINREVEELPEKPSAFKPAVEMQKTVPNKAFELKNEQTLRAAQMFPSESKQKDDEENSWDSESPCETVSQKDVYLPKATHQKEFDTLSGKLEESPVKDGLLKPTCGRKVSLPNKALELKDRETFKAESPDKDGLLKPTCGRKVSLPNKALELKDRETLKAESPDNDGLLKPTCGRKVSLPNKALELKDRETFKAAQMFPSESKQKDDEENSWDFESFLETLLQNDVCLPKATHQKEFDTLSGKLEESPDKDGLLKPTCGMKISLPNKALELKDRETFKAEDVSSVESTFSLFGKPTTENSQSTKVEEDFNLTTKEGATKTVTGQQERDIGIIERAPQDQTNKMPTSELGRKEDTKSTSDSEIISVSDTQNYECLPEATYQKEIKTTNGKIEESPEKPSHFEPATEMQNSVPNKGLEWKNKQTLRADSTTLSKILDALPSCERGRELKKDNCEQITAKMEQMKNKFCVLQKELSEAKEIKSQLENQKAKWEQELCSVRLPLNQEEEKRRNVDILKEKIRPEEQLRKKLEVKHQLEQTLRIQDIELKSVTSNLNQVSHTHESENDLFHENCMLKKEIAMLKLEVATLKHQHQVKENKYFEDIKILQEKNAELQMTLKLKQKTVTKRASQYREQLKVLTAENTMLTSKLKE

SEQ ID NO: 1558 - protein, 433 aa, Homo sapiens
MPCGKQGNLQVPGSKVLPGLGEGCKEMWLRKVIYGGEVWGKSPEPEFPSLVNLCQSWKINNLMSTVHSDEAGMLSYFLFEELMRCDKDSMPDGNLSEEEKLFLSYFPLHKFELEQNIKELNTLADQVDTTHELLTKTSLVASSSGAVSGVMNILGLALAPVTAGGSLMLSATGTGLGAAAAITNIVTNVLENRSNSAARDKASRLGPLTTSHEAFGGINWSEIEAAGFCVNKCVKAIQGIKDLHAYQMAKSNSGFMAMVKNFVAKRHIPFWTARGVQRAFEGTTLAMTNGAWVMGAAGAGFLLMKDMSSFLQSWKHLEDGARTETAEELRALAKKLEQELDRLTQHHRHLPQKASQTCSSSRGRAVRGSRVVKPEGSRSPLPWPVVEHQPRLGPGVALRTPKRTVSAPRMLGHQPAPPAPARKGRQAPGRHRQ

SEQ ID NO: 1559 - protein, 56 aa, Homo sapiens
LCMPLPPRAAELSWGDPESHPAAPCRPRSSSPPPAQQCSRSVWPLVVGRRKGLNRG

SEQ ID NO: 1560 - protein, 144 aa, Homo sapiens
MDSEEEEEVPQPMPSIPEDLESQKAMVAFFNSAVASAEEEQARLCGQLKECTASAWLICWPRPRRNLRQQPQPQELGVIPCVGRPTRPCRGPWRSCGRVHRTVPEPEGSAEGGGVHQQAGPGQGRGEGEAAGAGVACGRLQQVA

SEQ ID NO: 1561 - protein, 379 aa, Homo sapiens
MEQLSSANTRFALDLFLALSENNPAGNIFISPFSISSAMAMVFLGTRGNTAAQLSKTFHFNTVEEVHSRFQSLNADINKRGASYILKLANRLYGEKTYNFLPEFLVSTQKTYGADLASVDFQHASEDARKTINQWVKGQTEGKIPELLASGMVDNMTKLVLVNAIYFKGNWKDKFMKEATTNAPFRLNKKDRKTVKMMYQKKKFAYGYIEDLKCRVLELPYQGEELSMVILLPDDIEDESTGLKKIEEQLTLEKLHEWTKPENLDFIEVNVSLPRFKLEESYTLNSDLARLGVQDLFNSSKADLSGMSGARDIFISKIVHKSFVEVNEEGTEAAAATAGIATFCMLMPEENFTADHPFLFFIRHNSSGSILFLGRFSSP

SEQ ID NO: 1562 - protein, 1709 aa, Homo sapiens
MGFLPKLLLLASFFPAGQASWGVSSPQDVQGVKGSCLLIPCIFSFPADVEVPDGITAIWYYDYSGQRQVVSHSADPKLVEARFRGRTEFMGNPEHRVCNLLLKDLQPEDSGSYNFRFEISEVNRWSDVKGTLVTVTEEPRVPTIASPVELLEGTEVDFNCSTPYVCLQEQVRLQWQGQDPARSVTFNSQKFEPTGVGHLETLHMAMSWQDHGRILRCQLSVANHRAQSEIHLQVKYAPKGVKILLSPSGRNILPGELVTLTCQVNSSYPAVSSIKWLKDGVRLQTKTGVLHLPQAAWSDAGVYTCQAENGVGSLVSPPISLHIFMAEVQVSPAGPILENQTVTLVCNTPNEAPSDLRYSWYKNHVLLEDAHSHTLRLHLATRADTGFYFCEVQNVHGSERSGPVSVVVNHPPLTPVLTAFLETQAGLVGILHCSVVSEPLATLVLSHGGHILASTSGDSDHSPRFSGTSGPNSLRLEIRDLEETDSGEYKCSATNSLGNATSTLDFHANAARLLISPAAEVVEGQAVTLSCRSGLSPTPDARFSWYLNGALLHEGPGSSLLLPAASSTDAGSYHCRARDGHSASGPSSPAVLTVLYPPRQPTFTTRLDLDAAGAGAGRRGLLLCRVDSDPPARLQLLHKDRVVATSLPSGGGCSTCGGCSPRMKVTKAPNLLRVEIHNPLLEEEGLYLCEASNALGNASTSATFNGQATVLAIAPSHTLQEGTEANLTCNVSREAAGSPANFSWFRNGVLWAQGPLETVTLLPVARTDAALYACRILTEAGAQLSTPVLLSVLYPPDRPKLSALLDMGQGHMALFICTVDSRPLALLALFHGEHLLATSLGPQVPSHGRFQAKAEANSLKLEVRELGLGDSGSYRCEATNVLGSSNTSLFFQVRGAWVQVSPSPELQEGQAVVLSCQVHTGVPEGTSYRWYRDGQPLQESTSATLRFAAITLTQAGAYHCQAQAPGSATTSLAAPISLHVSYAPRHVTLTTLMDTGPGRLGLLLCRVDSDPPAQLRLLHGDRLVASTLQGVGGPEGSSPRLHVAVAPNTLRLEIHGAMLEDEGVYICEASNTLGQASASADFDAQAVNVQVWPGATVREGQLVNLTCLVWTTHPAQLTYTWYQDGQQRLDAHSIPLPNVTVRDATSYRCGVGPPGRAPRLSRPITLDVLYAPRNLRLTYLLESHGGQLALVLCTVDSRPPAQLALSHAGRLLASSTAASVPNTLRLELRGPQPRDEGFYSCSARSPLGQANTSLELRLEGVRVILAPEAAVPEGAPITVTCADPAAHAPTLYTWYHNGRWLQEGPAASLSFLVATRAHAGAYSCQAQDAQGTRSSRPAALQVLYAPQDAVLSSFRDSRARSMAVIQCTVDSEPPAELALSHDGKVLATSSGVHSLASGTGHVQVARNALRLQVQDVPAGDDTYVCTAQNLLGSISTIGRLQVEGARVVAEPGLDVPEGAALNLSCRLLGGPGPVGNSTFAWFWNDRRLHAEPVPTLAFTHVARAQAGMYHCLAELPTGAAASAPVMLRVLYPPKTPTMMVFVEPEGGLRGILDCRVDSEPLASLTLHLGSRLVASSQPQGAPAEPHIHVLASPNALRVDIEALRPSDQGEYICSASNVLGSASTSTYFGVRALHRLHQFQQLLWVLGLLVGLLLLLLGLGACYTWRRRRVCKQSMGENSVEMAFQKETTQLIDPDAATCETSTCAPPLG

SEQ ID NO: 1563 - protein, 441 aa, Homo sapiens
MIIPSLEELDSLKYSDLQNLAKSLGLRANLRATKLLKALKGYIKHEARKGNENQDESQTSASSCDETEIQISNQEEAERQPLGHVTKTRRRCKTVRVDPDSQQNHSEIKISNPTEFQNHEKQESQDLRATAKVPSPPDEHQEAENAVSSGNRDSKVPSEGKKSLYTDESSKPGKNKRTAITTPNFKKLHEAHFKEMESIDQYIERKKKHFEEHNSMNELKQQPINKGGVRTPVPPRGRLSVASTPISQRRSQGRSCGPASQSTLGLKGSLKRSAISAAKTGVRFSAATKDNEHKRSLTKTPARKSAHVTVSGGTPKGEAVLGTHKLKTITGNSAAVITPFKLTTEATQTPVSNKKPVFDLKASLSRPLNYEPHKGKLKPWGQSKENNYLNQHVNRINFYKKTYKQPHLQTKEEQRKKREQERKEKKAKVLGMRRGLILAED

SEQ ID NO: 1564 - protein, 185 aa, Homo sapiens
AHFRMHTQIKNQTAALISGFRSIIKPEWIRMFSTPELQRLISGDNAEIDLEDLKKHTVYYGGFHGSHRVIIWLWDILASDFTPDERAMFLKFVTSCSRPPLLGFAYLKPPFSIRCVEVSDDQDTGDTLGSVLRGFFTIRKREPGGRLPTSSTCFNLLKLPNYSKKSVLREKLRYAISMNTGFELS

SEQ ID NO: 1565 - protein, 1137 aa, Homo sapiens [sequence omitted]

SEQ ID NO: 1566 - protein, 875 aa, Homo sapiens
MGKTANSPGSGARPDPVRSFNRWKKKHSHRQNKKKQLRKQLKKPEWQVERESISRLMQNYEKINVNEITRFSDFPLSKKTLKGLQEAQYRLVTEIQKQTIGLALQGKDVLGAAKTGSGKTLAFLVPVLEALYRLQWTSTDGLGVLIISPTRELAYQTFEVLRKVGKNHDFSAGLIIGGKDLKHEAERINNINILVCTPGRLLQHMDETVSFHATDLQMLVLDEADRILDMGFADTMNAVIENLPKKRQTLLFSATQTKSVKDLARLSLKNPEYVWVHEKAKYSTPATLEQNYIVCELQQKISVLYSFLRSHLKKKSIVFFSSCKEVQYLYRVFCRLRPGVSILALHGRQQQMRRMEVYNEFVRKRAAVLFATDIAARGLDFPAVNWVLQFDCPEDANTYIHRAGRTARYKEDGEALLILLPSEKAMVQQLLQKKVPVKEIKINPEKLIDVQKKLESILAQDQDLKERAQRCFVSYVRSVYLMKDKEVFDVSKLPIPEYALSLGLAVAPRVRFLQKMQKQPTKELVRSQADKVIEPRAPSLTNDEVEEFRAYFNEKMSILQKGGKRLEGTEHRQDNDTGNEEQEEEEDDEEEMEEKLAKAKGSQAPSLPNTSEAQKIKEVPTQFLDRDEEEEDADFLKVKRHNVFGLDLKDEKTLQKKEPSKSSIKKKMTKVAEAKKVMKRNFKVNKKITFTDEGELVQQWPQMQKSAIKDAEEDDDTGGINLHKAKERLQEEDKFDKEEYRKKIKAKHREKRLKEREARREANKRQAKAKDEEEAFLDWSDDDDDDDDGFDPSTLPDPDKYRSSEDSDSEDMENKISDTKKKQGMKKRSNSEVEDVGPTSHNRKKARWDTLEPLDTGLSLAEDEELVLHLLRSQS

SEQ ID NO: 1567 - protein, 1338 aa, Homo sapiens
MDRASELLFYVNGRKVIEKNVDPETMLLPYLRKKLRLTGTKYGCGGGGCGACTVMISRYNPITKRIRHHPANACLIPICSLYGAAVTTVEGIGSTHTRIHPVQERIAKCHGTQCGFCTPGMVMSIYTLLRNHPEPTLDQLTDALGGNLCRCTGYRPIIDACKTFCKTSGCCQSKENGVCCLDQGINGLPEFEEGSKTSPKLFAEEEFLPLDPTQELIFPPELMIMAEKQSQRTRVFGSERMMWFSPVTLKELLEFKFKYPQAPVIMGNTSVGPEVKFKGVFHPVIISPDRIEELSVVNHAYNGLTLGAGLSLAQVKDILADVVQKLPEEKTQMYHALLKHLGTLAGSQIRNMASLGGHIISRHPDSDLNPILAVGNCTLNLLSKEGKRQIPLNEQFLSKCPNADLKPQEILVSVNIPYSRKWEFVSAFRQAQRQENALAIVNSGMRVFFGEGDGIIRELCISYGGVGPATICAKNSCQKLIGRHWNEQMLDIACRLILNEVSLLGSAPGGKVEFKRTLIISFLFKFYLEVSQILKKMDPVHYPSLADKYESALEDLHSKHHCSTLKYQNIGPKQHPEDPIGHPIMHLSGVKHATGEAIYCDDMPLVDQELFLTFVTSSRAHAKIVSIDLSEALSMPGVVDIMTAEHLSDVNSFCFFTEAEKFLATDKVFCVGQLVCAVLADSEVQAKRAAKRVKIVYQDLEPLILTIEESIQHNSSFKPERKLEYGNVDEAFKVVDQILEGEIHMGGQEHFYMETQSMLVVPKGEDQEMDVYVSTQFPKYIQDIVASTLKLPANKVMCHVRRVGGAFGGKVLKTGIIAAVTAFAANKHGRAVRCVLERGEDMLITGGRHPYLGKYKAGFMNDGRILALDMEHYSNAGASLDESLFVIEMGLLKMDNAYKFPNLRCRGWACRTNLPSNTAFRGFGFPQAALITESCITEVAAKCGLSPEKVRIINMYKEIDQTPYKQEINAKNLIQCWRECMAMSSYSLRKVAVEKFNAENYWKKKGLAMVPLKFPVGLGSRAAGQAAALVHIYLDGSVLVTHGGIEMGQGVHTKMIQVVSRELRMPMSNVHLRGTSTETVPNANISGGSVVADLNGLAVKDACQTLLKRLEPIISKNPKGTWKDWAQTAFDESINLSAVGYFRGYESDMNWEKGEGQPFEYFVYGAACSEVEIDCLTGDHKNIRTDIVMDVGCSINPAIDIGQIEGAFIQGMGLYTIEELNYSPQGILHTRGPDQYKIPAICDMPTELHIALLPPSQNSNTLYSSKGLGESGVFLGCSVFFAIHDAVSAARQERGLHGPLTLNSPLTPEKIRMACEDKFTKMIPRDEPGSYVPWNVPI

SEQ ID NO: 1568 - protein, 725 aa, Homo sapiens
MAAASAVSVLLVAAERNRWHRLPSLLLPPRTWVWRQRTMKYTTATGRNITKVLIANRGEIACRVMRTAKKLGVQTVAVYSEADRNSMHVDMADEAYSIGPAPSQQSYLSMEKIIQVAKTSAAQAIHPGCGFLSENMEFAELCKQEGIIFIGPPPSAIRDMGIKSTSKSIMAAAGVPVVEGYHGEDQSDQCLKEHARRIGYPVMIKAVRGGGGKGMRIVRSEQEFQEQLESARREAKKSFNDDAMLIEKFVDTPRHVEVQVFGDHHGNAVYLFERDCSVQRRHQKIIEEAPAPGIKSEVRKKLGEAAVRAAKAVNYVGAGTVEFIMDSKHNFCFMEMNTRLQVEHPVTEMITGTDLVEWQLRIAAGEKIPLSQEEITLQGHAFEARIYAEDPSNNFMPVAGPLVHLSTPRADPSTRIETGVRQGDEVSVHYDPMIAKLVVWAADRQAALTKLRYSLRQYNIVGLPTNIDFLLNLSGHPEFEAGNVHTDFIPQHHKQLLLSRKAAAKESLCQAALGLILKEKAMTDTFTLQAHDQFSPFSSSSGRRLNISYTRNMTLKDGKNNVAIAVTYNHDGSYSMQIEDKTFQVLGNLYSEGDCTYLKCSVNGVASKAKLIILENTIYLFSKEGSIEIDIPVPKYLSSVSSQETQGGPLAPMTGTIEKVFVKAGDKVKAGDSLMVMIAMKMEHTIKSPKDGTVKKVFYREGAQANRHTPLVEFEEEESDKRESE

SEQ ID NO: 1569 - protein, 333 aa, Homo sapiens
MCRGGRMFAPTKTWRRWHRRVNTTQKRYAICSALAASALPALVMSKGHRIEEVPELPLVVEDKVEGYKKTKEAVLLLKKLKAWNDIKKVYASQRMRAGKGKMRNRRRIQRRGPCIIYNEDNGIIKAFRNIPGITLLNVSKLNILKLAPGGHVGRFCIWTESAFRKLDELYGTWRKAASLKSNYNLPMHKMINTDLSRILKSPEIQRALRAPRKKIHRRVLKKNPLKNLRIMLKLNPYAKTMRRNTILRQARNHKLRVDKAAAAAAALQAKSDEKAAVAGKKPVVGKKGKKAAVGVKKQKKPLVGKKAAATKKPAPEKKPAEKKPTTEEKKPAA

SEQ ID NO: 1570 - protein, 175 aa, Homo sapiens
MAAVSMSVVLRQTLWRRRAVAVAALSVSRVPTRSLRTSSWRLAQDQTQDTQLITVDEKLDITTLTGVPEEHIKTRKVRIFVPARNNMQSGVNNTKKWKMEFDTRERWENPLMGWASTADPLSNMVLTFSTKEDAVSFAEKNGWSYDIEERKVPKPKSKSYGANFSWNKRTRVSTK

SEQ ID NO: 1571 - protein, 159 aa, Homo sapiens
MVPSAGQLALFALGIVLAACQALENSTSPLSDPPVAAAVVSHFNDCPDSHTQFCFHGTCRFLVQEDKPACVCHSGYVGARCEHADLLAVVAASQKKQAITALVVVSIVALAVLIITCVLIHCCQVRKHCEWCRALICRHEKPSALLKGRTACCHSETVV

SEQ ID NO: 1572 - protein, 258 aa, Homo sapiens
MAASVLNTVLRRLPMLSLFRGSHRVQVPLQTLCTKAPSEEDSLSSVPISPYKDEPWKYLESEEYQERYGSRPVWADYRRNHKGGVPPQRTRKTCIRRNKVVGNPCPICRDHKLHVDFRNVKLLEQFVCAHTGIIFYAPYTGVCVKQHKRLTQAIQKARDHGLLIYHIPQVEPRDLDFSTSHGAVSATPPAPTLVSSDPWYPWYNWKQPPERELSRLRRLYQGHLQEESGPPPESMPKMPPRTPAEASSTGQTGPQSAL

SEQ ID NO: 1573 - protein, 316 aa, Homo sapiens
MASRLLLNNGAKMPILGLGTWKSPPGQVTEAVKVAIDVGYRHIDCAHVYQNENEVGVAIQEKLREQVVKREELFIVSKLWCTYHEKGLVKGACQKTLSDLKLDYLDLYLIHWPTGFKPGKEFFPLDESGNVVPSDTNILDTRAAMEELVDEGLVKAIGISNFNHLQVEMILNKPGLKYKPAVNQIECHPYLTQEKLIQYCQSKGIVVTAYSPLGSPDRPWAKPEDPSLLEDPRIKAIAAKHNKTTAQVLIRFPMQRNLVVIPKSVTPERIAENFKVFDFELSSQDMTTLLSYNRNWRVCALLSCTSHKDYPFHEEF

SEQ ID NO: 1574 - protein, 338 aa, Homo sapiens [sequence omitted]

SEQ ID NO: 1575 - protein, 122 aa, Homo sapiens
MKLLTGLVFCSLVLSVSSRSFFSFLGEAFDGARDMWRAYSDMREANYIGSDKYFHARGNYDAAKRGPGGAWAAEVISNARENIQRLTGHGAEDSLADQAANKWGRSGRDPNHFRPAGLPEKY

SEQ ID NO: 1576 - protein, 355 aa, Homo sapiens
MEPHLLGLLLGLLLGGTRVLAGYPIWWSLALGQQYTSLGSQPLLCGSIPGLVPKQLRFCRNYIEIMPSVAEGVKLGIQECQHQFRGRRWNCTTIDDSLAIFGPVLDKATRESAFVHAIASAGVAFAVTRSCAEGTSTICGCDSHHKGPPGEGWKWGGCSEDADFGVLVSREFADARENRPDARSAMNKHNNEAGRTTILDHMHLKCKCHGLSGSCEVKTCWWAQPDFRAIGDFLKDKYDSASEMVVEKHRESRGWVETLRAKYSLFKPPTERDLVYYENSPNFCEPNPETGSFGTRDRTCNVTSHGIDGCDLLCCGRGHNTRTEKRKEKCHCIFHWCCYVSCQECIRIYDVHTCK

SEQ ID NO: 1577 - protein, 444 aa, Homo sapiens
MCPGSVPAPPVGQRTLRPWRREMQRVLSAQMLAVTGPRNSQRRTSRCSDEERPSTSRACVVNGPDGTRSAFSFRTLPQGGSSGPAHDERTNGSGSGATGEDRRGSSQPESCDVQSNEDYPRRPLTRARSRLSHVLLVSESEVAKTKPRHAMKRKRTADKSTSTSDPVIEDDHVQVLVLKSKNLVGVTMTNCGITDLVLKDCPKMMFIHATRCRVLKHLKVENAPIVNRFDYAQCKKLNMDQVLDQILRMPPERNRIIYLRPMQQVDTLTLEQKLFSGPYPYHICIIHEFSNPPNVRNKVRIRSWMDTIANINQELIKYEFFPEATRSEEDLKKYPKYPWGREIYTLEGVVDGAPYSMISDFPWLRSLRAAEPNSFARYDFEDDEESTIYAPRRKGQLSADICMETIGEEISEMRQMKKGVFQRVVAIFIHYCDVNGEPVEDDYI

SEQ ID NO: 1578 - protein, 651 aa, Homo sapiens
MLRLQMTDGHISCTAVEFSYMSKISLNTPPGTKVKLSGIVDIKNGFLLLNDSNTTVLGGEVEHLIEKWELQRSLSKHNRSNIGTEGGPPPFVPFGQKCVSHVQVDSRELDRRKTLQVTMPVKPTNDNDEFEKQRTAAIAEVAKSKETKTFGGGGGGARSNLNMNAAGNRNREVLQKEKSTKSEGKHEGVYRELVDEKALKHITEMGFSKEASRQALMDNGNNLEAALNVLLTSNKQKPVMGPPLRGRGKGRGRIRSEDEEDLGNARPSAPSTLFDFLESKMGTLNVEEPKSQPQQLHQGQYRSSNTEQNGVKDNNHLRHPPRNDTRQPRNEKPPRFQRDSQNSKSVLEGSGLPRNRGSERPSTSSVSEVWAEDRIKCDRPYSRYDRTKDTSYPLGSQHSDGAFKKRDNSMQSRSGKGPSFAEAKENPLPQGSVDYNNQKRGKRESQTSIPDYFYDRKSQTINNEAFSGIKIEKHFNVNTDYQNPVRSNSFIGVPNGEVEMPLKGRRIGPIKPAGPVTAVPCDDKIFYNSGPKRRSGPIKPEKILESSIPMEYAKMWKPGDECFALYWEDNKFYRAEVEALHSSGMTAVVKFIDYGNYEEVLLSNIKPIQTEAWEEEGTYDQTLEFRRGGDGQPRRSTRPTQQFYQPPRARN

SEQ ID NO: 1579 - protein, 453 aa, Homo sapiens
MAGAAAGGRGGGAWGPGRGGAGGLRRGCSPPAPAGSPRAGLQPLRATIPFQLQQPHQRRDGGGRAASVPCSVAPEKSVCRPQPLQVRRTFSLDTILSSYLLGQWPRDADGAFTCCTNDKATQTPLSWQELEGERASSCAHKRSASWGSTDHRKEISKLKQQLQRTKLSRSGKEKERGSPLLGDHAVRGALRASPPSFPSGSPVLRLSPCLHRSLEGLNQELEEVFVKEQGEEELLRILDIPDGHRAPAPPQSGSCDHPLLLLEPGNLASSPSMSLASPQPCGLASHEEHRGAAEELASTPNDKASSPGHPAFLEDGSPSPVLAFAASPRPNHSYIFKREPPEGCEKVRVFEEATSPGPDLAFLTSCPDKNKVHFNPTGSAFCPVNLMKPLFPGMGFIFRNCPSNPGSPLPPASPRPPPRKDPEASKASPLPFEPWQRTPPSEEPVLFQSSLMV

SEQ ID NO: 1580 - protein, 707 aa, Homo sapiens
MLGSLVLRRKALAPRLLLRLLRSPTLRGHGGASGRNVTTGSLGEPQWLRVATGGRPGTSPALFSGRGAATGGRQGGRFDTKCLAAATWGRLPGPEETLPGQDSWNGVPSRAGLGMCALAAALVVHCYSKSPSNKDAALLEAARANNMQEVSRLLSEGADVNAKHRLGWTALMVAAINRNNSVVQVLLAAGADPNLGDDFSSVYKTAKEQGIHSLEDGGQDGASRHITNQWTSALEFRRWLGLPAGVLITREDDFNNRLNNRASFKGCTALHYAVLADDYRTVKELLDGGANPLQRNEMGHTPLDYAREGEVMKLLRTSEAKYQEKQRKREAEERRRFPLEQRLKEHIIGQESAIATVGAAIRRKENGWYDEEHPLVFLFLGSSGIGKTELAKQTAKYMHKDAKKGFIRLDMSEFQERHEVAKFIGSPPGYVGHEEGGQLTKKLKQCPNAVVLFDEVDKAHPDVLTIMLQLFDEGRLTDGKGKTIDCKDAIFIMTSNVASDEIAQHALQLRQEALEMSRNRIAENLGDVQISDKITISKNFKENVIRPILKAHFRRDEFLGRINEIVYFLPFCHSELIQLVNKELNFWAKRAKQRHNITLLWDREVADVLVDGYNVHYGARSIKHEVERRVVNQLAAAYEQDLLPGGCTLRITVEDSDKQLLKSPELPSPQAEKRLPKLRLEIIDKDSKTRRLDIRAPLHPEKVCNTI

SEQ ID NO: 1581 - protein, 515 aa, Homo sapiens
GTRKHPATKDLAAAAAQGPQLPPPQAQPQPSGTGGGVSGQDRYDRATSSGRLPLPSPALEYTLGSRLANGLGREEAVAEGARRALLGSMPGLMPPGLLAAAVSGLGSRGLTLAPGLSPARPLFGSDFEKEKQQRNADCLAELNEAMRGRAEEWHGRPKAVREQLLALSACAPFNVRFKKDHGLVGRVFAFDATARPPGYEFELKLFTEYPCGSGNVYAGVLAVARQMFHDALREPGKALASSGFKYLEYERRHGSGEWRQLGELLTDGVRSFREPAPAEALPQQYPEPAPAALCGPPPRAPSRNLAPTPRRRKASPEPEGEAAGKMTTEEQQQRHWVAPGGPYSAETPGVPSPIAALKNVAEALGHSPKDPGGGGGPVRAGGASPAASSTAQPPTQHRLVARNGEAEVSPTAGAEAVSGGGSGTGATPGAPLCCTLCRERLEDTHFVQCPSVPGHKFCFPCSREFIKAQGPAGEVYCPSGDKCPLVGSSVPWAFMQGEIATILAGDIKVKKERDP

SEQ ID NO: 1582 - protein, 821 aa, Homo sapiens
HEGTSSPLPAPKKPTGVDLLTPGSRAPELKGRARGKPSLLAAARPMRAILPAPVNVGRGSSMGLPRARQAFSLSDKTPSVRTCGLKPSTLKQLGQPIQQPSGPGEVKLPSGPSNRTSQVKVVEVKPDMFPPYKYSCTVTLDLGLATSRGRGKCKNPSCSYVYTNRHKPRICPSCGVNLAKDRTEKTTKAIEVSSPLPDVLNATEPLSTAQREIQRQSTLQLLRKVLQIPENESELAEVFALIHELNSSRLILSNVSEETVTIEQTSWSNYYESPSTQCLLCSSPLFKGGQNSLAGPQECWLLTASRLQTVTAQVKMCLNPHCLALHSFIDIYTGLFNVGNKLLVSLDLLFAIRNQIKLGEDPRVSINVVLKSVQEQTEKTLTSEELSQLQELLCNGYWAFECLTVRDYNDMICGICGVAPKVEMAQRSEQNVLALKSVEFTWPEFLGSNEVNVEDFWATMETEVIEQVAFPASIPITKFDASVIAPFFPPLMRGAVVVNTEKDKNLDVQPVPGSGSALVRLLQEGTCKLDEIGSYSEEKLQHLLRQCGIPFGAEDSKDQLCFSLLALYESVQNGARAIRPPRHFTGGKIYKVCPHQVVCGSKYLVRGESARDHVDLLASSRHWPPVYVVDMATSVALCADLCYPELTNQMWGRNQGCFSSPTEPPVSVSCPELLDQHYTVDMTETEHSIQHPVTKTATRRIVHAGLQPNPGDPSAGHHSLALCPELAPYATILASIVDSKPNGVRQRPIAFDNATHYYLYNRLMDFLTSREIVNRQIHDIVQSCQPGEVVIRDTLYRLGVAQIKTETEEEGEEEEVAAVAE

SEQ ID NO: 1583 - protein, 256 aa, Homo sapiens
MLSRVVLSAAATAAPSLKNAAFLGPGVLQATRTFHTGQPHLVPVPPLPEYGGKVRYGLIPEEFFQFLYPKTGVTGPYVLGTGLILYALSKGIYVISAETFTALSVLGVMVYGIKKYGPFVADFADKLNEQKLAQLEEAKQASIQHIQNAIDTEKSQQALVQKRHYLFDVQRNNIAMALEVTYRERLYRVYKEVRNRLDYHISVQNMMRRKEQEHMINWVEKHVVQSISTQQEKETIAKCIADLKLLAKKAQAQPVM

SEQ ID NO: 1584 - protein, 89 aa, Homo sapiens
VGNLVSESAGRSAGQGSPGPDAMSRNLRTALIFGGFISLIGAAFYPIYFRPLMRLEEYKKEQAINRAGIVQEDVQPPGLKVWSDPFGRK

SEQ ID NO: 1585 - protein, 931 aa, Homo sapiens
MAARDSDSEEDLVSYGTGLEPLEEGERPKKPIPLQDQTVRDEKGRYKRFHGAFSGGFSAGYFNTVGSKEGWTPSTFVSSRQNRADKSVLGPEDFMDEEDLSEFGIAPKAIVTTDDFASKTKDRIREKARQLAAATAPIPGATLLDDLITPAKLSVGFELLRKMGWKEGQGVGPRVKRRPRRQKPDPGVKIYGCALPPGSSEGSEGEDDDYLPDNVTFAPKDVTPVDFTPKDNVHGLAYKGLDPHQALFGTSGEHFNLFSGGSERAGDLGEIGLNKGRKLGISGQAFGVGALEEEDDDIYATETLSKYDTVLKDEEPGDGLYGWTAPRQYKNQKESEKDLRYVGKILDGFSLASKPLSSKKIYPPPELPRDYRPVHYFRPMVAATSENSHLLQVLSESAGKATPDPGTHSKHQLNASKRAELLGETPIQGSATSVLEFLSQKDKERIKEMKQATDLKAAQLKARSLAQNAQSSRAQLSPAAAAGHCSWNMALGGGTATLKASNFKPFAKDPEKQKRYDEFLVHMKQGQKDALERCLDPSMTEWERGRERDEFARAALLYASSHSTLSSRFTHAKEEDDSDQVEVPRDQENDVGDKQSAVKMKMFGKLTRDTFEWHPDKLLCKRFNVPDPYPDSTLVGLPRVKRDKYSVFNFLTLPETASLPTTQASSEKVSQHRGPDKSRKPSRWDTSKHEKKEDSISEFLSLARSKAEPPKQQSSPLVNKEEEHAPELSANQTVNKDVDAQAEGEGSRPSMDLFRAIFASSSDEKSSSSEDEQGDSEDDQAGSGEANFQSSQDTDLGETSSVAHALVPAPQEPPPSFPIQKMQIDEREEFGPRLPPVFCPNARQTLEVPQKEKHKKNKDKHKAKKEHRRKKEKKKKHRKHKHKGKQKNKKPEKSSSSESSDSSDSQSDEETADVSPQELLRRLKSLPLRRQ

SEQ ID NO: 1586 - protein, 242 aa, Homo sapiens
LKQLLSRLCGLLLEEGSHPGAPAKPVDLAPVEAPGPLAPVPSTVCPLRRKLWQNYRNLTFDPVSANRHFYLSRQDQQVKHCRQSRGPGGPGSFELWQVQCAQSFQAGHHYWEVRASDHSVTLGVSYPQLPRCRLGPHTDNIGRGPCSWGLCVQEDSLQAWHNGEAQRLPGVSGRLLGMDLDLASGCLTFYSLEPQTQPLYTFHALFNQPLTPVFWLLEGRTLTLCHQPGAVFPLGPQEEVLS

SEQ ID NO: 1587 - protein, 259 aa, Homo sapiens
FVIPHQFIHRICDEITGRVPKKALGITLIKGIDEGPEGLKLISDIIREKMGIDISVLMGANIANEVAAEKFCETTIGSKVMENGLLFKELLQTPNFRITVVDDADTVELCGALKNIVAVGAGFCDGLRCGDNTKAAVIRLGLMEMIAFARIFCKGQVSTATFLESCGVADLITTCYGGRNRRVAEAFARTGKTIEELEKEMLNGQKLQGPQTSAEVYRILKQKGLLDKFPLFTAVYQICYESRPVQEMLSCLQSHPEHT

SEQ ID NO: 1588 - protein, 505 aa, Homo sapiens
ALGFLSSYGIGMEYDQAKALIYYTFGSAGGNMMSQMILGYRYLSGINVLQNCEVALSYYKKVADYIADTFEKSEGVPVEKVRLTERPENLSSNSEILDWDIYQYYKFLAERGDVQIQVSLGQLHLIGRKGLDQDYYKALHYFLKAAKAGSANAMAFIGKMYLEGNAAVPQNNATAFKYFSMAASKGNAIGLHGLGLLYFHGKGVPLNYAEALKYFQKAAEKGWPDAQFQLGFMYYSGSGIWKDYKLAFKYFYLASQSGQPLAIYYLAKMYATGTGVVRSCRTAVELYKGVCELGHWAEKFLTAYFAYKDGDIDSSLVQYALLAEMGYEVAQSNSAFILESKKANILEKEKMYPMALLLWNRAAIQGNAFARVKIGDYHYYGYGTKKDYQTAATHYSIAANKYHNAQAMFNLAYMYEHGLGITKDIHLARRLYDMAAQTSPDAHIPVLFAVMKLETTHLLRDILFFNFTTRWNWLKLDNTIGPHWDLFVIGLIVPGLILLLRNHHG

SEQ ID NO: 1589 - protein, 267 aa, Homo sapiens [sequence omitted]

SEQ ID NO: 1590 - protein, 197 aa, Homo sapiens
MTARGTPSRFLASVLHNGLGRYVQQLQRLSFSVSRDGASSRGAREFVEREVIDFARRNPGVVIYVNSRPCCVPRVVAEYLNGAVREESIHCKSVEEISTLVQKLADQSGLDVIRIRKPFHTDNPSIQGQWTPSPTSRPRSAGYAPERFRILPQPRCKHSEELPHQLQPQALDCYSGKGGSSPLGFQAQANGTHQWAS

SEQ ID NO: 1591 - protein, 1207 aa, Homo sapiens
MSSGDPAHLGLCLWLWLGATLGREQVQASGLLRLAVLPEDRLQMKWRESEGSGLGYLVQVKPMAGDSEQEVILTTKTPKATVGGLSPSKGYTLQIFELTGSGRFLLARREFVIEDLKSSSLDRSSQRPLGSGAPEPTPSHTGSPDPEQASEPQVAFTPSQDPRTPGGSEWRETGPQFRCLPPVPADMVFLVDGSWSIGHSHFQQVKDFLASVIAPFEIGPDKVQVGLTQYSGDAQTEWDLNSLSTKEQVLAAVRRLRYKGGNTFTGLALTHVLGQNLQPAAGLRPEAAKVVILVTDGKSQDDVHTAARVLKDLGVNVFAVGVKNADEAELRLLASPPRDITVHSVLDFLQLGALAGLLSRLICQRLQGGSPRQGPAAAPALDTLPAPTSLVLSQVTSSSIRLSWTPAPRHPLKYLIVWRASRGGTPREVVVEGPAASTELHNLASRTEYLVSVFPIYEGGVGEGLRGLVTTAPLPPPRALTLAAVTPRTVHLTWQPSAGATHYLVRCSPASPKGEEEEREVQVGRPEVLLDGLEPGRDYEVSVQSLRGPEGSEARGIRARTPTLAPPRHLGFSDVSHDAARVFWEGAPRPVRLVRVTYVSSEGGHSGQTEAPGNATSATLGPLSSSTTYTVRVTCLYPGGGSSTLTGRVTTKKAPSPSQLSMTELPGDAVQLAWVAAAPSGVLVYQITWTPLGEGKAHEISVPGNLGTAVLPGLGRHTEYDVTILAYYRDGARSDPVSLRYTPSTVSRSPPSNLALASETPDSLQVSWTPPLGRVLHYWLTYAPASGLGPEKSVSVPGARSHVTLPDLQAATKYRVLVSAIYAAGRSEAVSATGQTACPALRPDGSLPGFDLMVAFSLVEKAYASIRGVAMEPSAFGGTPTFTLFKDAQLTRRVSDVYPAPLPPEHTIVFLVRLLPETPREAFALWQMTAEDFQPLLGVLLDAGKKSLTYFHRDPRAALQEATFDPQEVRKIFFGSFHKVHVAVGRSKVRLYVDCRKVAERPLGEMGSPPAAGFVTLGRLAKARGPRSSSAAFQLQMLQIVCSDTWADEDRCCELPASRDGETCPAFVSACSCSSETPGPPGPQGPPGLPGRNGTPGEQGFPGPRGPPGVKGEKGDHGLPGLQGHPGHQGIPGRVGLQGPKGMRGLEGTAGLPGPLAPGGSRAWQGPGALVESEDLQGPWGPQDCQGPKGNEERRASRSPLPPSTSL

SEQ ID NO: 1592 - protein, 521 aa, Homo sapiens
MAAHLVKRCTCLLREAARQAPAMAPVGRLRLAWVAHKTLTSSATSPISHLPGSLMEPVEKERASTPYIEKQVDHLIKKATRPEELLELLGGSHDLDSNQAAMVLIRLSHLLSEKPEDKGLLIQDAHFHQLLCLLNSQIASVWHGTLSKLLGSLYALGIPKASKELQSVEQEVRWRMRKLKYKHLAFLAESCATLSQEQHSQELLAELLTHLERRWTEIEDSHTLVTVMMKVGHLSEPLMNRLEDKHVLNRAQDITLPHLCSVLLAFARLNFHPDQEDQFFSLVHEKLGSELPGLEPALQVDLVWALCVLQQAREAELQAVLHPEFHIQFLGGKSQKDQNTFQKLLHINATALLEYPEYSGPLLPASAVAPGPSALDRKVTPLQKELQETLKGLLGSADKGSLEVATQYGWVLDAEVLLDSDGEFLPVRDFVAPHLAQPTGSQSPPPGSKRLAFLRWEFPNFNSRSKDLLGRFVLARRHIVAAGFLIVDVPFYEWLELKSEWQKGAYLKDKMRKAVAEELAK

SEQ ID NO: 1593 - protein, 774 aa, Homo sapiens
MEPEREGTERHPRKVREGRQAPNKLVGAAEAMKAGWDLEESQPEAKKARLSTILFTDNCEVTHDQLCELLKYAVLGKSNVPKPSWCQLFHQNHLNNVVVFVLQGMSQLHFYRFYLEFGCLRKAFRHKFRLPPPSSDFLADVVGLQTEQRAGDLPKTMEGPLPSNAKAAINLQDDPIIQKYGSKKVGLTRCLLTKEEMRTFHFPLQGFPDCENFLLTKCNGSIADNSPLFGLDCEMCLTSKGRELTRISLVAEGGCCVMDELVKPENKILDYLTSFSGITKKILNPVTTKLKDVQRQLKALLPPDAVLVGHSLDLDLRALKMIHPYVIDTSLLYVREQGRRFKLKFLAKVILGKDIQCPDRLGHDATEDARTILELARYFLKHGPKKIAELNLEALANHQEIQAAGQEPKNTAEVLQHPNTSVLECLDSVGQKLLFLTRETDAGELPSSRNCQTIKCLSNKEVLEQARVEIPLFPFSIVQFSFKAFSPVLTEEMNKRMRIKWTEISTVYAGPFSKNCNLRALKRLFKSFGPVQSMTFVLETRQPHLCIQYEVLEAAQLAIESLDGILVDGICIKVQRPVTELTLDCDTLVNELEGDSENQGSIYLSGVSETFKEQLLQEPRLFLGLEAVILPKDLKSGKQKKYCFLKFKSFGSAQQALNILTGKDWKLKGRHALTPRHLHAWLRGLPPESTRLPGLRVVPPPFEQEALQTLKLDHPKIAAWRWSRKIGKLYNSLCPGTLCLILLPGTKSTHGSLSGLGLMGIKEEEESAGPGLCS

SEQ ID NO: 1594 - protein, 811 aa, Homo sapiens
MRLIRNIYIFCSIVMTAEGDAPELPEERELMTNCSNMSLRKVPADLTPATTTLDLSYNLLFQLQSSDFHSVSKLRVLILCHNRIQQLDLKTFEFNKELRYLDLSNNRLKSVTWYLLAGLRYLDLSFNDFDTMPICEEAGNMSHLEILGLSGAKIQKSDFQKIAHLHLNTVFLGFRTLPHYEEGSLPILNTTKLHIVLPMDTNFWVLLRDGIKTSKILEMTNIDGKSQFVSYEMQRNLSLENAKTSVLLLNKVDLLWDDLFLILQFVWHTSVEHFQIRNVTFGGKAYLDHNSFDYSNTVMRTIKLEHVHFRVFYIQQDKIYLLLTKMDIENLTISNAQMPHMLFPNYPTKFQYLNFANNILTDELFKRTIQLPHLKTLILNGNKLETLSLVSCFANNTPLEHLDLSQNLLQHKNDENCSWPETVVNMNLSYNKLSDSVFRCLPKSIQILDLNNNQIQTVPKETIHLMALRELNIAFNFLTDLPGCSHFSRLSVLNIEMNFILSPSLDFVQSCQEVKTLNAGRNPFRCTCELKNFIQLETYSEVMMVGWSDSYTCEYPLNLRGIRLKDVHLHELSCNTALLIVTIVVIMLVLGLAVAFCCLHFDLPWYLRMLGQCTQTWHRVRKTTQEQLKRNVRFHAFISYSEHDSLWVKNELIPNLEKEDGSILICLYESYFDPGKSISENIVSFIEKSYKSIFVLSPNFVQNEWCHYEFYFAHHNLFHENSDHIILILLEPIPFYCIPTRYHKLKALLEKKAYLEWPKDRRKCGLFWANLRAAINVNVLATREMYELQTFTELNEESRGSTISLMRTDCL

SEQ ID NO: 1595 - protein, 715 aa, Homo sapiens
MVPGSEGPARAGSVVADVVFVIEGTANLGPYFEGLRKHYLLPAIEYFNGGPPAETDFGGDYGGTQYSLVVFNTVDCAPESYVQCHAPTSSAYEFVTWLDGIKFMGGGGESCSLIAEGLSTALQLFDDFKKMREQIGQTHRVCLLICNSPPYLLPAVESTTYSGCTTENLVQQIGERGIHFSIVSPRKLPALRLLFEKAAPPALLEPLQPPTDVSQDPRHMVLVRGLVLPVGGGSALGPLQSKQPVPLPPAAPSGATLSAAPQQPLPPVPPQYQVPGNLSAAQVAAQNAVEAAKNQKAGLGPRFSPITPLQQAAPGVGPPFSQAPAPQLPPGPPGAPKPPPASQPSLVSTVAPGSGLAPTAQPGAPSMAGTVAPGGVSGPSPAQLGAPALGGQQSVSNKLLAWSGVLEWQEKPKPASVDANTKLTRSLPCQVYVNHGENLKTEQWPQKLIMQLIPQQLLTTLGPLFRNSRMVQFHFTNKDLESLKGLYRIMGNGFAGCVHFPHTAPCEVRVLMLLYSSKKKIFMGLIPYDQSGFVNGIRQVITNHKQVQQQKLEQQQRGMGGQQAPPRAGAHSGGPSQALTESAPAPPTAAPASGYRRGLWGHGAAPAPRYCPAPARCPSRPSWSSFWPTPSWTHPSAPEPWGQPSAAKPPPQPTTAADWGAPTPGLPPPPAQSWPAQLPPRAPLPGKGTRGRAEVWTECPSSSWARAPRPSAPGK

SEQ ID NO: 1596 - protein, 201 aa, Homo sapiens
MNPEYDYLFKLLLIGDSGVGKSCLLLRFADDTYTESYISTIGVDFKIRTIELDGKTIKLQIWDTAGQERFRTITSSYYRGAHGIIVVYDVTDQESYANVKQWLQEIDRYASENVNKLLVGNKSDLTTKKVVDNTTAKEFADSLGIPFLETSAKNATNVEQAFMTMAAEIKKRMGPGAASGGERPNLKIDSTPVKPAGGGCC

SEQ ID NO: 1597 - protein, 434 aa, Homo sapiens
AKQQLNLRTHMADENKNEYAAQLQNFNGEQHKHFYVVIPQIYKQLQEMDERRTIKLSECYRGFADSERKVIPIISKCLEGMILAAKSVDERRDSQMVVDSFKSGFEPPGDFPFEDYSQHIYRTISDGTISASKQESGKMDAKTTVGKAKGKLWLFGKKPKPQSPPLTPTSLFTSSTPNGSQFLTFSIEPVHYCMNEIKTGKPRIPSFRSLKRGGPALEDFSHLPPEQRRKKLQQRIDELNRELQKESDQKDALNKMKDVYEKNPQMGDPGSLQPKLAETMNNIDRLRMEIHKNEAWLSEVEGKTGGRGDRRHSSDINHLVTQGRESPEGSYTDDANQEVRGPPQQHGHHNEFDDEFEDDDPLPAIGHCKAIYPFDGHNEGTLAMKEGEVLYIIEEDKGDGWTRARRQNGEEGYVPTSYIDVTLEKNSKGAVTYI

SEQ ID NO: 1598 - protein, 4097 aa, Homo sapiens [sequence omitted]

SEQ ID NO: 1599 - protein, 166 aa, Homo sapiens
AFAAWEPSGAAVSRSPLSPPSRPFASREPAGFRAALADPPGMPRYELALILKAMQRPETAATLKRTIEALMDRGAIVRDLENLGERALPYRISAHSQQHNRGGYFLVDFYAPTAAVESMVEHLSRDIDVIRGNIVKHPLTQELKECEGIVPVPLAEKLYSTKKRKK

SEQ ID NO: 1600 - protein, 337 aa, Homo sapiens
GTRHFQSPPPVPGEVLKLDDVIDNIMRLDDVLGYINPEMQMPNTLPLSSSHLNVYSSDPQVTASLVGVTSSSCPADLTQKRELTDAESRALAKERQKKDNHNLIERRRRFNINDRIKELGMLIPKANDLDVRWNKGTILKASVDYIRRMQKDLQKSRELENHSRRLEMTNKQLWLRIQELEMQARVHGLPTTSPSGMNMAELAQQVVKQELPSEEGPGEALMLGAEVPDPEPLPALPPQAPLPLPTQPPSPFHHLDFSHSLSFGGREDEGPPGYPEPLAPGHGSPFPSLSKKDLDLMLLDDSLLPLASDPLLSTMSPEASKASSRRSSFSMEEGDVL

SEQ ID NO: 1601 - protein, 542 aa, Homo sapiens
HEGRMAAEQDPEARAAARPLLTDLYQATMALGYWRAGRARDAAEFELFFRRCPFGGAFALAAGLRDCVRFLRAFRLRDADVQFLASVLPPDTDPAFFEHLRALDCSEVTVRALPEGSLAFPGVPLLQVSGPLLVVQLLETPLLCLVSYASLVATNAARLRLIAGPEKRLLEMGLRRAQGPDGGLTASTYSYLGGFDSSSNVLAGQLRGVPVAGTLAHSFVTSFSGSEVPPDPMLAPAAGEGPGVDLAAKAQVWLEQVCAHLGLGVQEPHPGERAAFVAYALAFPRAFQGLLDTYSVWRSGLPNFLAVALALGELGYRAVGVRLDSGDLLQQAQEIRKVFRAAAAQFQVPWLESVLIVVSNNIDEEALARLAQEGSEVNVIGIGTSVVTCPQQPSLGGVYKLVAVGGQPRMKLTEDPEKQTLPGSKAAFRLLGSDGSPLMDMLQLAEEPVPQAGQELRVWPPGAQEPCTVRPAQVEPLLRLCLQQGQLCEPLPSLAESRALAQLSLSRLSPEHRRLRSPAQYQVVLSERLQALVNSLCAGQSP

SEQ ID NO: 1602 - protein, 483 aa, Homo sapiens
MSNKLLSPHPHSVVLRSEFKMASSPAVLRASRLYQWSLKSSAQFLGSPQLRQVGQIIRVPARMAATLILEPAGRCCWDEPVRIAVRGLAPEQPVTLRASLRDEKGALFQAHARYRADTLGELDLERAPALGGSFAGLEPMGLLWALEPEKPLVRLVKRDVRTPLAVELEVLDGHDPDPGRLLCQTRHERYFLPPGVRREPVRVGRVRGTLFLPPEPGPFPGIVDMFGTGGGLLEYRASLLAGKGFAVMALAYYNYEDLPKTMETLHLEYFEEAMNYLLSHPEVKGPGVGLLGISKGGELCLSMASFLKGITAAVVINGSVANVGGTLRYKGETLPPVGVNRNRIKVTKDGYADIVDVLNSPLEGPDQKSFIPVERAESTFLFLVGQDDHNWKSEFYANEACKRLQAHGRRKPQIICYPETGHYIEPPYFPLCRASLHALVGSPIIWGGEPRAHVMAQVDAWKQLQTFFHKHLGGHEGTIPSKV

SEQ ID NO: 1603 - protein, 311 aa, Homo sapiens
HEARYSVQLMSFVYNLSDTHLFPNASSKEIKTVESITDIRADIDKKYRCVSGTQVHMNNVTVTLHDATIQAYLSNSSFSRGETRCEQDRPSPTTAPPAPPSPSPSPVPKSPSVDKYNVSGTNGTCLLASMGLQLNLTYERKDNTTVTRLLNINPNKTSASGSCGAHLVTLELHSEGTTVLLFQFGMNASSSRFFLQGIQLNTILPDARDPAFKAANGSLRALQATVGNSYKCNAEEHVRVTKAFSVNIFKVWVQAFKVEGGQFGSVEECLLDENSMLIPIAVGGALAGLVLIVLIAYLVGRKRSHAGYQTI

SEQ ID NO: 1604 - protein, 361 aa, Homo sapiens [sequence omitted]

SEQ ID NO: 1605 - protein, 396 aa, Homo sapiens
RWTRRLRASLAGQVGGTGLRIPRPRFGPAGDMASSGEDISNDDDDMHPAAAGMADGVHLLGFSDEILLHILSHVPSTDLILNVRRTCRKLAALCLDKSLIHTVLLQKDYQASEDKVRQLVKEIGREIQQLSMAGCYWLPGSTVEHVARCRSLVKVNLSGCHLTSLRLSKMLSALQHLRSLAIDVSPGFDASQLSSECKATLSRVRELKQTLFTPSYGVVPCCTSLEKLLLYFEILDRTREGAILSGQLMVGQSNVPHYQNLRVFYARLAPGYINQEVVRLYLAVLSDRTPQNLHAFLISVPGSFAESGATKNLLDSMARNVVLDALQLPKSWLNGSSLLQHMKFNNPFYFSFSRCTLSGGHLIQQVINGGKDLRSLASLNLSGCVHCLSPDSLLCR

SEQ ID NO: 1606 - protein, 575 aa, Homo sapiens
NIEESQAVEAAMANVPWAEVCEKFQAALALSRVELHKNPEKEPYKSKYSARALLEEVKALLGPAPEDEDERPEAEDGPGAGDHALGLPAEVVEPEGPVAQRAVRLAVIEFHLGVNHIDTEELSAGEEHLVKCLRLLRRYRLSHDCISLCIQAQNNLGILWSEREEIETAQAYLESSEALYNQYMKEVGSPPLDPTERFLPEEEKLTEQERSKRFEKVYTHNLYYLAQVYQHLEMFEKAAHYCHSTLKRQLEHNAYHPIEWAINAATLSQFYINKLCFMEARHCLSAANVIFGQTGKISATEDTPEAEGEVPELYHQRKGEIARCWIKYCLTLMQNAQLSMQDNIGELDLDKQSELRALRKKELDEEESIRKKAVQFGTGELCDAISAVEEKVSYLRPLDFEEARELFLLGQHYVFEAKEFFQIDGYVTDHIEVVQDHSALFKVLAFFETDMERRCKMHKRRIAMLEPLTVDLNPQYYLLVNRQIQFEIAHAYYDMMDLKVAIADRLRDPDSHIVKKINNLNKSALKYYQLFLDSLRDPNKVFPEHIGEDVLRPAMLAKFRVARLYGKIITADPKK

SEQ ID NO: 1607 - protein, 1016 aa, Homo sapiens
AGGSERELGLADGMEDYEQELCGVEDDFHNQFAAELEVLAELEGASTPSPSGVPLFTAGRPPRTFEEALARGDAASSPAPAASVGSSQGGARKRQVDADLQPAGSLPHGRLAALPQGLRSGREAEEASGSLHVSPPAPRIKRPRLQVVKRLNFRSEEMEEPPPPDSSPTDITPPPSPEDLAELWGHGVSEAAADVGLTRASPAARNPVLRRPPILEDYVHVTSTEGVRAYLVLRADPMAPGVQGSLLHVPWRGGGQLDLLGVSLASLKKQVDGERRERLLQEAQKLSDTLHSLRSGEEEAAQPLGAPEEEPTDGQDASSHCLWVDEFAPRHYTELLSDDFTNRCLLKWLKLWDLVVFGHERPSRKPRPSVEPARVSKEATAPGKWKSHEQVLEEMLEAGLDPSQRPKQKVALLCGPPGLGKTTLAHVIARHAGYSVVEMNASDDRSPEVFRTRIEAATQMESVLGAGGKPNCLVIDEIDGAPVAAINVLLSILNRKGPQEVGPQGPAVPSGGGRRRRAEGGLLMRPIICICNDQFAPSLRQLKQQAFLLHFPPTLPSRLVQRLQEVSLRQGMRADPGVLAALCEKTDNDIRACINTLQFLYSRGQRELSVRDVQATRVGLKDQRRGLFSVWQEVFQLPRAQRRRVGQDPALPADTLLLGDGDAGSLTSASQRFYRVLHAAASAGEHEKVVQGLFDNFLRLRLRDSSLGAVCVALDWLAFDDLLAGAAHHSQSFQLLRYPPFLPVAFHVLFASSHTPRITFPSSQQEAQNRMSQMRNLIQTLVSGIAPATRSRATPQALLLDALCLLLDILAPKLRPVSTQLYSTREKQQLASLVGTMLAYSLTYRQERTPDGQYIYRLEPNVEELCRFPELPARKPLTYQTKQLIAREIEVEKMRRAEASARVENSPQVDGSPPGLEGLLGGIGEKGVHRPAPRNHEQRLEHIMRRAAREEQPEKDFFGRVVVRSTAVPSAGDTAPEQDSVERRMGTAVGRSEVWFRFNEGVSNAVRRSLYIRDLL

SEQ ID NO: 1608 - protein, 231 aa, Homo sapiens
MFLVGLTGGIASGKSSVIQVFQQLGCAVIDVDVMARHVVQPGYPAHRRIVEVFGTEVLLENGDINRKVLGDLIFNQPDRRQLLIAITHPEIRKEMMKETFKYFLRGYRYVILDIPLLFETKKLLKYMKHTVVVYCDRDTQLARLMRRNSLNRKDAEARINAQLPLTDKARMARHVLDNSGEWSVTKRQVILLHTELERSLEYLPLRFGVLTGLAAIASLLYLLTHYLLPYA

SEQ ID NO: 1609 - protein, 1027 aa, Homo sapiens
ADKTPGGSQKASSKTRSSDVHSSGSSDAHMDASGPSDSDMPSRTRPKSPRKHNYRNESARESLCDSPHQNLSRPLLENKLKAFSIGKMSTAKRTLSKKEQEELKKKEDEKAAAEIYEEFLAAFEGSDGNKVKTFVRGGVVNAAKEEHETDEKRGKIYKPSSRFADQKNPPNQSSNERPPSLLVIETKKPPLKKGEKEKKKSNLELFKEELKQIQEERDERHKTKGRLSRFEPPQSDSDGQRRSMDAPSRRNRSSVLDDYAPGSHDVGDPSTTNLYLGNINPQMNEEMLCQEFGRFGPLASVKIMWPRTDEERARERNCGFVAFMNRRDAERALKNLNGKMIMSFEMKLGWGKAVPIPPHPIYIPPSMMEHTLPPPPSGLPFNAQPRERLKNPNAPMLPPPKNKEDFEKTLSQAIVKVVIPTERNLLALIHRMIEFVVREGPMFEAMIMNREINNPMFRFLFENQTPAHVYYRWKLYSILQGDSPTKWRTEDFRMFKNGSFWRPPPLNPYLHGMSEEQETEAFVEEPSKKGALKEEQRDKLEEILRGLTPRKNDIGDAMVFCLNNAEAAEEIVDCITESLSILKTPLPKKIARLYLVSDVLYNSSAKVANASYYRKFFETKLCQIFSDLNATYRTIQGHLQSENFKQRVMTCFRAWEDWAIYPEPFLIKLQNIFLGLVNIIEEKETEDVPDDLDGAPIEEELDGAPLEDVDGIPIDATPIDDLDGVPIKSLDDDLDGVPLDATEDSKKNEPIFKVAPSKWEAVDESELEAQAVTTSKWELFDQHEESEEEENQNQEEESEDEEDTQSSKSEEHHLYSNPIKEEMTESKFSKYSEMSEEKRAKLREIELKVMKFQDELESGKRPKKPGQSFQEQVEHYRDKLLQREKEKELERERERDKKDKEKLESRSKDKKEKDECTPTRKERKRRHSTSPSPSRSSSGRRVKSPSPKSERSERSERSHKESSRSRSSHKDSPRDVSKKAKRSPSGSRTPKRSRRSRSRSPKKSGKKSRSQSRSPHRSHKKSKKNKH

SEQ ID NO: 1610 - protein, 1629 aa, Homo sapiens
MQFVSWATLLTLLVRDLAEMGSPDAAAAVRKDRLHPRQVKLLETLGEYEIVSPIRVNALGEPFPTNVHFKRTRRSINSATDPWPAFASSSSSSTSSQAHYRLSAFGQQFLFNLTANAGFIAPLFTVTLLGTPGVNQTKFYSEEEAELKHCFYKGYVNTNSEHTAVISLCSGMLGTFRSHDGDYFIEPLQSMDEQEDEEEQNKPHIIYRRSAPQREPSTGRHACDTSEHKNRHSKDKKKTRARKWGERINLAGDVAALNSGLATEAFSAYGNKTDNTREKRTHRRTKRFLSYPRFVEVLVVADNRMVSYHGENLQHYILTLMSIVASIYKDPSIGNLINIVIVNLIVIHNEQDGPSISFNAQTTLKNFCQWQHSKNSPGGIHHDTAVLLTRQDICRAHDKCDTLGLAELGTICDPYRSCSISEDSGLSTAFTIAHELGHVFNMPHDDNNKCKEEGVKSPQHVMAPTLNFYTNPWMWSKCSRKYITEFLDTGYGECLLNEPESRPYPLPVQLPGILYNVNKQCELIFGPGSQVCPYMMQCRRLWCNNVNGVHKGCRTQHTPWADGTECEPGKHCKYGFCVPKEMDVPVTDGSWGSWSPFGTCSRTCGGGIKTAIRECNRPEPKNGGKYCVGRRMKFKSCNTEPCLKQKRDFRDEQCAHFDGKHFNINGLLPNVRWVPKYSGILMKDRCKLFCRVAGNTAYYQLRDRVIDGTPCGQDTNDICVQGLCRQAGCDHVLNSKARRDKCGVCGGDNSSCKTVAGTFNTVHYGYNTVVRIPAGATNIDVRQHSFSGETDDDNYLALSSSKGEFLLNGNFVVTMAKREIRIGNAVVEYSGSETAVERINSTDRIEQELLLQVLSVGKLYNPDVRYSFNIPIEDKPQQFYWNSHGPWQACSKPCQGERKRKLVCTRESDQLTVSDQRCDRLPQPGHITEPCGTDCDLRWHVASRSECSAQCGLGYRTLDIYCAKYSRLDGKTEKVDDGFCSSHPKPSNREKCSGECNTGGWRYSAWTECSKSCDGGTQRRRAICVNTRNDVLDDSKCTHQEKVTIQRCSEFPCPQWKSGDWSECLVTCGKGHKHRQVWCQFGEDRLNDRMCDPETKPTSMQTCQQPECASWQAGPWGQCSVTCGQGYQLRAVKCIIGTYMSVVDDNDCNAATRPTDTQDCELPSCHPPPAAPETRRSTYSAPRTQWRFGSWTPCSATCGKGTRMRYVSCRDENGSVADESACATLPRPVAKEECSVTPCGQWKALDWSSCSVTCGQGRATRQVMCVNYSDHVIDRSECDQDYIPETDQDCSMSPCPQRTPDSGLAQHPFQNEDYRPRSASPSRTHVLGGNQWRTGPWGACSSTCAGGSQRRVVVCQDENGYTANDCVERIKPDEQRACESGPCPQWAYGNWGECTKLCGGGIRTRLVVCQRSNGERFPDLSCEILDKPPDREQCNTHACPHDAAWSTGPWSSCSVSCGRGHKQRNVYCMAKDGSHLESDYCKHLAKPHGHRKCRGGRCPKWKAGAWSQCSVSCGRGVQQRHVGCQIGTHKIARETECNPYTRPESERDCQGPRCPLYTWRAEEWQECTKTCGEGSRYRKVVCVDDNKNEVHGARCDVSKRPVDRESCSLQPCEYVWITGEWSEVPSWEL

SEQ ID NO: 1611 - protein, 331 aa, Homo sapiens
MSRQLSRARPATVLGAMEMGRRMDAPTSAAVTRAFLERGHTEIDTAFVYSEGQSETILGGLGLRLGGSDCRVKIDTKAIPLFGNSLKPDSLRFQLETSLKRLQCPRVDLFYLHMPDHSTPVEETLRACHQLHQEGKFVELGLSNYAAWEVAEICTLCKSNGWILPTVYQGMYNAITRQVETELFPCLRHFGLRFYAFNPLAGGLLTGKYKYEDKNGKQPVGRFFGNTWAEMYRNRYWKEHHFEGIALVEKALQAAYGASAPSMTSATLRWMYHHSQLQGAHGDAVILGMSSLEQLEQNLAAAEEGPLEPAVVDAFNQAWHLVTHECPNYFR

SEQ ID NO: 1612 - protein, 1023 aa, Homo sapiens
MFHLRTCAAKLRPLTASQTVKTFSQNRPAAARTFQQIRCYSAPVAAEPFLSGTSSNYVEEMYCAWLENPKSVHKSWDIFFRNTNAGAPPGTAYQSPLPLSRGSLAAVAHAQSLVEAQPNVDKLVEDHLAVQSLIRAYQIRGHHVAQLDPLGILDADLDSSVPADIISSTDKLGFYGLDESDLDKVFHLPTTTFIGGQESALPLREIIRRLEMAYCQHIGVEFMFINDLEQCQWIRQKFETPGIMQFTNEEKRTLLARLVRSTRFEEFLQRKWSSEKRFGLEGCEVLIPALKTIIDKSSENGVDYVIMGMPHRGRLNVLANVIRKELEQIFCQFDSKLEAADEGSGDVKYHLGMYHRRINRVTDRNITLSLVANPSHLEAADPVVMGKTKAEQFYCGDTEGKKVMSILLHGDAAFAGQGIVYETFHLSDLPSYTTHGTVHVVVNNQIGFTTDPRMARSSPYPTDVARVVNAPIFHVNSDDPEAVMYVCKVAAEWRSTFHKDVVVDLVCYRRNGHNEMDEPMFTQPLMYKQIRKQKPVLQKYAELLVSQGVVNQPEYEEEISKYDKICEEAFARSKDEKILHIKHWLDSPWPGFFTLDGQPRSMSCPSTGLTEDILTHIGNVASSVPVENFTIHGGLSRILKTRGEMVKNRTVDWALAEYMAFGSLLKEGIHIRLSGQDVERGTFSHRHHVLHDQNVDKRTCIPMNHLWPNQAPYTVCNSSLSEYGVLGFELGFAMASPNALVLWEAQFGDFHNTAQCIIDQFICPGQAKWVRQNGIVLLLPHGMEGMGPEHSSARPERFLQMCNDDPDVLPDLKEANFDINQLYDCNWVVVNCSTPGNFFHVLRRQILLPFRKPLIIFTPKSLLRHPEARSSFDEMLPGTHFQRVIPEDGPAAQNPENVKRLLFCTGKVYYDLTRERKARDMVGQVAITRIEQLSPFPFDLLLKEVQKYPNAELAWCQEEHKNQGYYDYVKPRLRTTISRAKPVWYAGRDPAAAPATGNKKTHLTELQRLLDTAFDLDVFKNFS

SEQ ID NO: 1613 - protein, 725 aa, Homo sapiens
MADEDLIFRLEGVDGGQSPRAGHDGDSDGDSDDEEGYFICPITDDPSSNQNVNSKVNKYYSNLTKSERYSSSGSPANSFHFKEAWKHAIQKAKHMPDPWAEFHLEDIATERATRHRYNAVTGEWLDDEVLIKMASQPFGRGAMRECFRTKKLSNFLHAQQWKGASNYVAKRYIEPVDRDVYFEDVRLQMEAKLWGEEYNRHKPPKQVDIMQMCIIELKDRPGKPLFHLEHYIEGKYIKYNSNSGFVRDDNIRLTPQAFSHFTFERSGHQLIVVDIQGVGDLYTDPQIHTETGTDFGDGNLGVRGMALFFYSHACNRICESMGLAPFDLSPRERDAVNQNTKLLQSAKTILRGTEEKCGSPQVRTLSGSRPPLLRPLSENSGDENMSDVTFDSLPSSPSSATPHSQKLDHLHWPVFSDLDNMASRDHDHLDNHRESENSGDSGYPSEKRGELDDPEPREHGHSYSNRKYESDEDSLGSSGRVCVEKWNLLNSSRLHLPRASAVALEVQRLNALDLEKKIGKSILGKVHLAMVRYHEGGRFCEKGEEWDQESAVFHLEHAANLGELEAIVGLGLMYSQLPHHILADVSLKETEENKTKGFDYLLKAAEAGDRQSMILVARAFDSGQNLSPDRCQDWLEALHWYNTALEMTDCDEGGEYDGMQDEPRYMMLAREAEMLFTGGYGLEKDPQRSGDLYTQAAEAAMEAMKGRLANQYYQKAEEAWAQMEE

SEQ ID NO: 1614 - protein, 64 aa, Homo sapiens [sequence omitted]

SEQ ID NO: 1615 - protein, 713 aa, Homo sapiens
MGRGAGREYSPAATTAENGGGKKKQKEKELDELKKEVAMDDHKLSLDELGRKYQVDLSKGLTNQRAQDVLARDGPNALTPPPTTPEWVKFCRQLFGGFSILLWIGAILCFLAYGIQAAMEDEPSNDNLYLGVVLAAVVIVTGCFSYYQEAKSSKIMDSFKNMVPQQALVIREGEKMQINAEEVVVGDLVEVKGGDRVPADLRIISSHGCKVDNSSLTGESEPQTRSPEFTHENPLETRNICFFSTNCVEGTARGIVIATGDRTVMGRIATLASGLEVGRTPIAMEIEHFIQLITGVAVFLGVSFFVLSLILGYSWLEAVIFLIGIIVANVPEGLLATVTVCLTLTAKRMARKNCLVKNLEAVETLGSTSTICSDKTGTLTQNRMTVAHMWFDNQIHEADTTEDQSGATFDKRSPTWTALSRIAGLCNRAVFKAGQENISVSKRDTAGDASESALLKCIELSCGSVRKMRDRNPKVAEIPFNSTNKYQLSIHEREDSPQSHVLVMKGAPERILDRCSTILVQGKEIPLDKEMQDAFQNAYMELGGLGERVLGFCQLNLPSGKFPRGFKFDTDELNFPTEKLCFVGLMSMIDPPRAAVPDAVGKCRSAGIKVIMVTGDHPITAKAIAKGVGIISEGNETVEDIAARLNIPMSQVNPREAKACVVHGSDLKDMTSEQLDEILKNHTEIVFARTSPQQKLIIVEGCQRQGSHCGRDG

SEQ ID NO: 1616 - protein, 925 aa, Homo sapiens [sequence omitted]

SEQ ID NO: 1617 - protein, 146 aa, Homo sapiens
MVSVVKSEDFSLPAYMDRRDHPLPEVAHVKHLSASQKALKEKEKASWSSLSMDEKVELYRIKFKESFAEMNRGSNEWKTVVGGAMFFIGFTALVIMWQKHYVYGPLPQSFDKEWVAKQTKRMLDMKVNPIQGLASKWDYEKNEWKK

SEQ ID NO: 1618 - protein, 961 aa, Homo sapiens
MHGHRAPGGAGPSEPEHPATNPPGAAPPACADSDPGASEPGLLARRGSGSALGGPLDPQFVGPSDTSLGAAPGHRVLPCGPSPQHHRALRFSYHLEGSQPRPGLHQGNRILVKSLSLDPGQSLEPHPEGPQRLRSDPGPPTETPSQRPSPLKRAPGPKPQVPPKPSYLQMPRMPPPLEPIPPPPSRPLPADPRVAKGLAPRAEASPSSAAVSSLIEKFEREPVIVASDRPVPGPSPGPPEPVMLPQPTSQPPVPQLPEGEASRCLFLLAPGPRDGEKVPNRDSGIDSISSPSNSEETCFVSDDGPPSHSLCPGPPALASVPVALADPHRPGSQEVDSDLEEEDDEEEEEEKDREIPVPLMERQESVELTVQQKVFHIANELLQTEKAYVSRLHLLDQVFCARLLEEARNRSSFPADVVHGIFSNICSIYCFHQQFLLPELEKRMEEWDRYPRIGDILQKLAPFLKMYGEYVKNFDRAVELVNTWTERSTQFKVIIHEVQKEEACGNLTLQHHMLEPVQRIPRYELLLKDYLLKLPHGSPDSKDAQKSLELIATAAEHSNAAIRKMERMHKLLKVYELLGGEEDIVSPTKELIKEGHILKLSAKNGTTQDRYLILFNDRLLYCVPRLRLLGQKFSVRARIDVDGMELKESSNLNLPRTFLVSGKQRSLELQARTEEEKKDWVQAINSTLLKHEQTLETFKLLNSTNREDEDTPPNSPNVDLGKRAPTPIREKEVTMCMRCQEPFNSITKRRHHCKACGHVVCGKCSEFRARLVYDNNRSNRVCTDCYVALHGVPGSSPACSQHTPQRRRSILEKQASVAAENSVICSFLHYMEKGGKGWHKAWFVVPENEPLVLYIYGAPQDVKAQRSLPLIGFEVGPPEAGERPDRRHVFKITQSHLSWYFSPETEELQRRWMAVLGRAGRGDTFCPGPTLSEDREMEEAPVAALGATAEPPESPQTRDKT

SEQ ID NO: 1619 - protein, 474 aa, Homo sapiens
MAYIQLEPLNEGFLSRISGLLLCRWTCRHCCQKCYESSCCQSSEDEVEILGPFPAQTPPWLMASRSSDKDGDSVHTASEVPLTPRTNSPDGRRSSSDTSKSTYSLTRRISSLESRRPSSPLIDIKPIEFGVLSAKKEPIQPSVLRRTYNPDDYFRKFEPHLYSLDSNSDDVDSLTDEEILSKYQLGMLHFSTQYDLLHNHLTVRVIEARDLPPPISHDGSRQDMAHSNPYVKICLLPDQKNSKQTGVKRKTQKPVFEERYTFEIPFLEAQRRTLLLTVVDFDKFSRHCVIGKVSVPLCEVDLVKGGHWWKALIPSSQNEVELGELLLSLNYLPSAGRLNVDVIRAKQLLQTDVSQGSDPFVKIQLVHGLKLVKTKKTSFLRGTIDPFYNESFSFKVPQEELENASLVFTVFGHNMKSSNDFIGRIVIGQYSSGPSETNHWRRMLNTHRTAVEQWHSLRSRAECDRVSPASLEVT

SEQ ID NO: 1620 - protein, 438 aa, Homo sapiens
MGDWHSQGRLLTVFVQCRHPPALRGKYLDYLDDQQLQNGSCADPSPSASLTADRRRQPLPTAAGEEMTPPAGLAEELPPQPQLQQQGRFLAGVAWDGAARELVGNRSALRLSRRGPGLQQPSPSVAAAAGPAPQSLDLHKKPQRGRPTRADPALAEPTPTASPGSAPSPAGDPWQRATKHRLGTEHQERAAQSDGGAGLPPLVSDPCDFNKFILCNLTVEAVGADSASVRWAVREHRSPRPLGGARFRLLFDRFGQQPKFHRFVYLPESSDSATLRELRGDTPYLVCVEGVLGGRVCPVAPRDHCAGLVTLPEAGSRGGVDYQLLTLALLTVNALLVLLALAAWASRWLRRKLRARRKGGAPVHVRHMYSTRRPLRSMGTGVSADFSGFQSHRPRTTVCALSEADLIEFPCDRFMDSAGGGAGGSLRREDRLLQRFAD

SEQ ID NO: 1621 - protein, 326 aa, Homo sapiens [sequence omitted]

SEQ ID NO: 1622 - protein, 1072 aa, Homo sapiens
MAPPTGVLSSLLLLVTIAGCARKQCSEGRTYSNAVISPNLETTRIMRVSHTFPVVDCTAACCDLSSCDLAWWFEGRCYLVSCPHKENCEPKKMGPIRSYLTFVLRPVQRPAQLLDYGDMMLNRGSPSGIWGDSPEDIRKDLTFLGKDWGLEEMSEYSDDYRELEKDLLQPSGKQEPRGSAEYTDWGLLPGSEGAFNSSVGDSPAVPAETQQDPELHYLNESASTPAPKLPERSVLLPLPTTPSSGEVLEKEKASQLQEQSSNSSGKEVLMPSHSLPPASLELSSVTVEKSPVLTVTPGSTEHSIPTPPTSAAPSESTPSELPISPTTAPRTVKELTVSAGDNLIITLPDNEVELKAFVAPAPPVETTYNYEWNLISHPTDYQGEIKQGHKQTLNLSQLSVGLYVFKVTVSSENAFGEGFVNVTVKPARRVNLPPVAVVSPQLQELTLPLTSALIDGSQSTDDTEIVSYHWEEINGPFIEEKTSVDSPVLRLSNLDPGNYSFRLTVTDSDGATNSTTAALIVNNAVDYPPVANAGPNHTITLPQNSITLNGNQSSDDHQIVLYEWSLGPGSEGKHVVMQGVQTPYLHLSAMQEGDYTFQLKVTDSSRQQSTAVVTVIVQPENNRPPVAVAGPDKELIFPVESATLDGSSSSDDHGIVFYHWEHVRGPSAVEMENIDKAIATVTGLQVGTYHFRLTVKDQQGLSSTSTLTVAVKKENNSPPRARAGGRHVLVLPNNSITLDGSRSTDDQRIVSYLWIRDGQSPAAGDVIDGSDHSVALQLTNLVEGVYTFHLRVTDSQGASDTDTATVEVQPDPRKSGLVELTLQVGVGQLTEQRKDTLVRQLAVLLNVLDSDIKVQKIRAHSDLSTVIVFYVQSRPPFKVLKAAEVARNLHMRLSKEKADFLLFKVLRVDTAGCLLKCSGHGHCDPLTKRCICSHLWMENLIQRYIWDGESNCEWSIFYVTVLAFTLIVLTGGFTWLCICCCKRQKRTKIRKKTKYTILDNMDEQERMELRPKYGIKHRSTEHNSSLMVSESEFDSDQDTIFSREKMERGNPKVSMNGSIRNGASFSYCSKDR

SEQ ID NO: 1623 - protein, 418 aa, Homo sapiens
MSIEIPAGLTELLQGFTVEVLRHQPADLLEFALQHFTRLQQENERKGTARFGHEGRTWGDLGAAAGGGTPSKGVNFAEEPMQSDSEDGEEEEAAPADAGAFNAPVINRFTRRASVCAEAYNPDEEEDDAESRIIHPKTDDQRNRLQEACKDILLFKNLDPEQMSQVLDAMFEKLVKDGEHVIDQGDDGDNFYVIDRGTFDIYVKCDGVGRCVGNYDNRGSFGELALMYNTPRAATITATSPGALWGLDRVTFRRIIVKNNAKKRKMYESFIESLPFLKSLEFSERLKVVDVIGTKVYNDGEQIIAQGDSADSFFIVESGEVKITMKRKGKSEVEENGAVEIARCSRGQYFGELALVTNKPRAASAHAIGTVKCLAMDVQAFERLLGPCMEIMKRNIATYEEQLVALFGTNMDIVEPTA

SEQ ID NO: 1624 - protein, 3427 aa, Homo sapiens
  VARIANT 113, 114, 115, 116, 117, 118, 119, 120, 121, 122, 123, 124,125, 126, 127, 128, 129, 130, 131, 132, 133, 134, 135, 136,137, 138, 139, 140, 141, 142, 143, 144, 145, 146, 147, 148,149, 150, 151, 152, 153, 154, 155, 156, 157, 158: Xaa = Any Amino Acid
MERSGWARQTFLLALLLGATLRARAAAGYYPRFSPFFFLCTHHGELEGDGEQGEVLISLHIAGNPTYYVPGQEYHVTISTSTFFDGLLVTGLYTSTSVQASQSIGGSSAFGFXXXXXXXXXXXXXXXXXXXXXXXXXXXXXXXXXXXXXXXXXXXXXXATATHRGQVIFKDALAQQLCEQGAPTDVTVHPHLAEIHSDSIILRDDFDSYHQLQLNPNIWVECNNCETGEQCGAIMHGNAVTFCEPYGPRELITTGLNTTTASVLQFSIGSGSCRFSYSDPSIIVLYAKNNSADWIQLEKIRAPSNVSTIIHILYLPEDAKGENVQFQWKQENLRVGEVYEACWALDNILIINSAHRQVVLEDSLDPVDTGNWLFFPGATVKHSCQSDGNSIYFHGNEGSEFNFATTRDVDLSTEDIQEQWSEEFESQPTGWDVLGAVIGTECGTIESGLSMVFLKDGERKLCTPSMDTTGYGNLRFYFVMGGICDPGNSHENDIILYAKIEGRKEHITLDTLSYSSYKVPSLVSVVINPELQTPATKFCLRQKNHQGHNRNVWAVDFFHVLPVLPSTMSHMIQFSINLGCGTHQPGNSVSLEFSTNHGRSWSLLHTECLPEICAGPHLPHSTVYSSENYSGWNRITIPLPNAALTRNTRIRWRQTGPILGNMWAIDNVYIGPSCLKFCSGRGQCTRHGCKCDPGFSGPACEMASQTFPMFISESFGSSRLSSYHNFYSIRGAEVSFGCGVLASGKALVFNKDGRRQLITSFLDSSQSRFLQFTLRLGSKSVLSTCRAPDQPGEGVLLHYSYDNGITWKLLEHYSYLSYHEPRIISVELPGDAKQFGIQFRWWQPYHSSQREDVWAIDEIIMTSVLFNSISLDFTNLVEVTQSLGFYLGNVQPYCGHDWTLCFTGDSKLASSMRYVETQSMQIGASYMIQFSLVMGCGQKYTPHMDNQVKLEYSTNHGLTWHLVQEECLPSMPSCQEFTSASIYHASEFTQWRRVIVLLPQKTWSSATRFRWSQSYYTAQDEWALDSIYIGQQCPNMCSGHGSCDHGICRCDQGYQGTECHPEAALPSTIMSDFENQNGWESDWQEVIGGEIVKPEQGCGVISSGSSLYFSKAGKRQLVSWDLDTSWVDFVQFYIQIGGESASCNKPDSREEGVLLQYSNNGGIQWHLLAEMYFSDFSKPRFVYLELPAAAKTPCTRFRWWQPVFSGEDYDQWAVDDIIILSEKQKQIIPVINPTLPQNFYEKPAFDYPMNQMSVWLMLANEGMVKNETFCAATPSAMIFGKSDGDRFAVTRDLTLKPGYVLQFKLNIGCANQFSSTAPVLLQYSHDAGMSWFLVKEGCYPASAGKGCEGNSRELSEPTMYHTGDFEEWTRITIVIPRSLASSKTRFRWIQESSSQKNVPPFGLDGVYISEPCPSYCSGHGDCISGVCFCDLGYTAAQGTCVSNVPNHNEMFDRFEGKLSPLWYKITGAQVGTGCGTLNDGKSLYFNGPGKREARTVPLDTRNIRLVQFYIQIGSKTSGITCIKPRTRNEGLIVQYSNDNGILWHLLRELDFMSFLEPQIISIDLPQDAKTPATAFRWWQPQHGKHSAQWALDDVLIGMNDSSQTGFQDKFDGSIDLQANWYRIQGGQVDIDCLSMDTALIFTENIGKPRYAETWDFHVSASTFLQFEMSMGCSKPFSNSHSVQLQYSLNNGKDWHLVTEECVPPTIGCLHYTESSIYTSERFQNWKRITVYLPLSTISPRTRFRWIQANYTVGADSWAIDNVVLASGCPWMCSGRGICDAGRCVCDRGFGGPYCVPVVPLPSILKDDFNGNLHPDLWPEVYGAERGNLNGETIKSGTSLIFKGEGLRMLISRDLDCTNTMYVQFSLRFIAKSTPERSHSILLQFSISGGITWHLMDEFYFPQTTNILFINVPLPYTAQTNATRFRLWQPYNNGKKEEIWIVDDFIIDGNNVNNPVMLLDTFDFGPREDNWFFYPGGNIGLYCPYSSKGAPEEDSAMVFVSNEVGEHSITTRDLNVNENTIIQFEINVGCSTDSSSADPVRLEFSRDFGATWHLLLPLCYHSSSHVSSLCSTEHHPSSTYYAGTMQGWRREVVHFGKLHLCGSVRFRWYQGFYPAGSQPVTWAIDNVYIGPQCEEMCNGQGSCINGTKCICDPGYSGPTCKISTKNPDFLKDDFEGQLESDRFLLMSGGKPSRKCGILSSGNNLFFNEDGLRMLMTRDLDLSHARFVQFFMRLGCGKGVPDPRSQPVLLQYSLNGGLSWSLLQEFLFSNSSNVGRYIALEIPLKARSGSTRLRWWQPSENGHFYSPWVIDQILIGGNISGNTVLEDDFTTLDSRKWLLHPGGTKMPVCGSTGDALVFIEKASTRYVVSTDVAVNEDSFLQIDFAASCSVTDSCYAIELEYSVDLGLSWHPLVRDCLPTNVECSRYHLQRILVSDTFNKWTRITLPLPPYTRSQATRFRWHQPAPFDKQQTWAIDNVYIGDGCIDMCSGHGRCIQGNCVCDEQWGGLYCDDPETSLPTQLKDNFNRAPSSQNWLTVNGGKLSTVCGAVASGMALHFSGGCSRLLVTVDLNLTNAEFIQFYFMYGCLITPNNRNQGVLLEYSVNGGITWNLLMEIFYDQYSKPGFVNILLPPDAKEIATRFRWWQPRHDGLDQNDWAIDNVLISGSADQRTVMLDTFSSAPVPQHERSPADAGPVGRIAFDMFMEDKTSVNEHWLFHDDCTVERFCDSPDGVMLCGSHDGREVYAVTHDLTPTEGWIMQFKISVGCKVSEKIAQNQIHVQYSTDFGVSWNYLVPQCLPADPKCSGSVSQPSVFFPTKGWKRITYPLPESLVGNPVRFRFYQKYSDMQWAIDNFYLGPGCLDNCRGHGDCLREQCICDPGYSGPNCYLTHTLKTFLKERFDSEEIKPDLWMSLEGGSTCTECGILAEDTALYFGGSTVRQAVTQDLDLRGAKFLQYWGRIGSENNMTSCHRPICRKEGVLLDYSTDGGITWTLLHEMDYQKYISVRHDYILLPEDALTNTTRLRWWQPFVISNGIVVSGVERAQWALDNILIGGAEINPSQLVDTFDDEGTSHEENWSFYPNAVRTAGFCGNPSFHLYWPNKKKDKTHNALSSRELIIQPGYMMQFKIVVGCEATSCGDLHSVMLEYTKDARSDSWQLVQTQCLPSSSNSIGCSPFQFHEATIYNSVNSSSWKRITIQLPDHVSSSATQFRWIQKGEETEKQSWAIDHVYIGEACPKLCSGHGYCTTGAICICDESFQGDDCSVFSHDLPSYIKDNFESARVTEANWETIQGGVIGSGCGQLAPYAHGDSLYFNGCQIRQAATKPLDLTRASKIMFVLQIGSMSQTDSCNSDLSGPHAVDKAVLLQYSVNNGITWHVIAQHQPKDFTQAQRVSYNVPLEARMKGVLLRWWQPRHNGTGHDQWALDHVEVVL

SEQ ID NO: 1625 - protein, 198 aa, Homo sapiens
MASGNARIGKPAPDFKATAVVDGAFKEVKLSDYKGKYVVLFFYPLDFTFVCPTEIIAFSNRAEDFRKLGCEVLGVSVDSQFTHLAWINTPRKEGGLGPLNIPLLADVTRRLSEDYGVLKTDEGIAYRGLFIIDGKGVLRQITVNDLPVGRSVDEALRLVQAFQYTDEHGEVCPAGWKPGSDTIKPNVDDSKEYFSKHN

SEQ ID NO: 1626 - protein, 242 aa, Homo sapiens
MAAPAVKVARGWSGLALGVRRAVLQLPGLTQVRWSRYSPEFKDPLIDKEYYRKPVEELTEEEKYVRELKKTQLIKAAPAGKTSSVFEDPVISKFTNMMMIGGNKVLARSLMIQTLEAVKRKQFEKYHAASAEEQATIERNPYTIFHQALKNCEPMIGLVPILKGGRFYQVPVPLPDRRRRFLAMKWMITECRDKKHQRTLMPEKLSHKLLEAFHNQGPVIKRKHDLHKMAEANRALAHYRWW

SEQ ID NO: 1627 - protein, 274 aa, Homo sapiens
MLSVASRSGPFAPVLSATSRGVAGALRPLVQATVPATPEQPVLDLKRPFLSRESLSGQAVRRPLVASVGLNVPASVCYSHTDIKVPDFSEYRRLEVLDSTKSSRESSEARKGFSYLVTGVTTVGVAYAAKNAVTQFVSSMSASADVLALAKIEIKLSDIPEGKNMAFKWRGKPLFVRHRTQKEIEQEAAVELSQLRDPQHDLDRVKKPEWVILIGVCTHLGCVPIANAGDFGGYYCPCHGSHYDASGRIRLGPAPLNLEVPTYEFTSDDMVIVG

SEQ ID NO: 1628 - protein, 495 aa, Homo sapiens
MEFRKLRGMETRPPANTARLQPPRDLRSSSPRKQLSESSDDDYDDVDIPTPAEDTPPPLPPKPKFRSPSDEGPGSMGDDGQLSPGVLVRCASGPPPNSPRPGPPPSTSSPHLTAHSEPSLWNPPSRELDKPPLLPPKKEKMKRKGCALLVKLFNGCPLRIHSTAAWTHPSTKDQHLLLGAEEGIFILNRNDQEATLEMLFPSRTTWVYSINNVLMSLSGKTPHLYSHSILGLLERKETRAGNPIAHISPHRLLARKNMVSTKIQDTKGCRACCVAEGASSGGPFLCGALETSVVLLQWYQPMNKFLLVRQVLFPLPTPLSVFALLTGPGSELPAVCIGVSPGRPGKSVLFHTVRFGALSCWLGEMSTEHRGPVQVTQVEEDMVMVLMDGSVKLVTPEGSPVRGLRTPEIPMTEAVEAVAMVGGQLQAFWKHGVQVWALGSDQLLQELRDPTLTFRLLGSPRLECSGTISPHCNLLLPGSSNSPASASRVAGITGL

SEQ ID NO: 1629 - protein, 1938 aa, Homo sapiens
MSSDAEMAIFGEAAPYLRKPEKERIEAQNRPFDSKKACFVADNKEMYVKGMIQTRENDKVIVKTLDDRMLTLNNDQVFPMNPPKFDKIEDMAMMTHLHEPAVLYNLKERYAAWMIYTYSGLFCVTVNPYKWLPVYKPEVVAAYRGKKRQEAPPHIFSISDNAYQFMLTDRDNQSILITGESGAGKTVNTKRVIQYFATIAVTGDKKKETQPGKMQGTLEDQIIQANPLLEAFGNAKTVRNDNSSRFGKFIRIHFGATGKLASADIETYLLEKSRVTFQLSSERSYHIFYQIMSNKKPELIDLLLISTNPFDFPFVSQGEVTVASIDDSEELLATDNAIDILGFSSEEKVGIYKLTGAVMHYGNMKFKQKQREEQAEPDGTEVADKAGYLMGLNSAEMLKGLCCPRVKVGNEYVTKGQNVQQVTNSVGALAKAVYEKMFLWMVTRINQQLDTKQPRQYFIGVLDIAGFEIFDFNSLEQLCINFTNEKLQQFFNHHMFVLEQEEYKKEGIEWEFIDFGMDLAACIELIEKPMGIFSILEEECMFPKATDTSFKNKLYDQHLGKSNNFQKPKPAKGKAEAHFSLVHYAGTVDYNIAGWLDKNKDPLNETVVGLYQKSSLKLLSFLFSNYAGAETGDSGGSKKGGKKKGSSFQTVSAVFRENLNKLMTNLRSTHPHFVRCLIPNETKTPGVMDHYLVMHQLRCNGVLEGIRICRKGFPSRILYADFKQRYRILNASAIPEGQFIDSKNASEKLLNSIDVDREQFRFGNTKVFFKAGLLGLLEEMRDEKLVTLMTSTQAVCRGYLMRVEFKKMMERRDSIFCIQYNIRSFMNVKHWPWMNLFFKIKPLLKSAEAEKEMATMKEDFERTKEELARSEARRKELEEKMVSLLQEKNDLQLQVQSETENLMDAEERCEGLIKSKILLEAKVKELTERLEEEEEMNSELVAKKRNLEDKCSSLKRDIDDLELTLTKVEKEKHATENKVKNLSEEMTALEENISKLTKEKKSLQEAHQQTLDDLQVEEDKVNGLIKINAKLEQQTDDLEGSLEQEKKLRADLERAKRKLEGDLKMSQESIMDLENDKQQIEEKLKKKEFELSQLQAKIDDEQVHSLQFQKKIKELQARIEELEEEIEAEHTLRAKIEKQRSDLARELEEISERLEEASGATSAQIEMNKKREAEFQKMRRDLEEATLQHEATAATLRKKQADSVAELGEQIDNLQRVKQKLEKEKSELKMEIDDMASNIEALSKSKSNIERTCRTVEDQFSEIKAKDEQQTQLIHDLNMQKARLQTQNGELSHRVEEKESLISQLTKSKQALTQQLEELKRQMEEETKAKNAMAHALQSSRHDCDLLREQYEEEQEAKAELQRALSKANSEVAQWRTKYETDAIQRTEELEEAKKKLAQRLQEAEENTETANSKCASLEKTKQRLQGEVEDLMRDLERSHTACATLDKKQRNFDKVLAEWKQKLDESQAELEAAQKESRSLSTELFKMRNAYEEVVDQLETLRRENKNLQEEISDLTEQIAETGKNLQEAEKTKKLVEQEKSDLQVALEEVEGSLEHEESKILRVQLELSQVKSELDRKVIEKDEEIEQLKRNSQRAAEALQSVLDAEIRSRNDALRLKKKMEGDLNEMEIQLGHSNRQMAETQKHLRTVQGQLKDSQLHLDDALRSNEDLKEQLAIVERRNGLLLEELEEMKVALEQTERTRRLSEQELLDASDRVQLLHSQNTSLINTKKKLEADIAQCQAEVENSIQESRNAEEKAKKAITDAAMMAEELKKEQDTSAHLERMKKNLEQTVKDLQHRLDEAEQLALKGGKKQIQKLENRVRELENELDVEQKRGAEALKGAHKYERKVKEMTYQAEEDHKNILRLQDLVDKLQAKVKSYKRQAEEAEEQANTQLSRCRRVQHELEEAAERADIAESQVNKLRAKSRDVGSQKMEE

SEQ ID NO: 1630 - protein, 373 aa, Homo sapiens
MKPVPGTPPSSKAKSPISSGSGGSHMSGTSSSSGMKSSSGLGSSGSLSQKTPPSSNSCTASSSSFSSSGSSMSSSQNQHGSSKGKSPSRNKKPSLTAVIDKLKHGVVTSGPGGEDPLDGQMGVSTNSSSHPMSSKHNMSGGEFQGKREKSDKDKSKVSTSGSSVDSSKKTSESKNVGSTGVAKIIISKHDGGSPSIKAKVTLQKPGESSGEGLRPQMASSKNYGSPLISGSTPKHERGSPSHSKSPAYTPQNLDSESESGSSIAEKSYQNSPSSDDGIRPLPEYSTEKHKKHKKEKKKVKDKDRDRDRDKDRDKKKSHSIKPESWSKSPISSDQSLSMTSNTILSADRPSRLSPDFMIGEEDDDLMDVALIGN

SEQ ID NO: 1631 - protein, 298 aa, Homo sapiens
MTDAAVSFAKDFLAGGVAAAISKTAVAPIERVKLLLQVQHASKQITADKQYKGIIDCVVRIPKEQGVLSFWRGNLANVIRYFPTQALNFAFKDKYKQIFLGGVDKRTQFWLYFAGNLASGGAAGATSLCFVYPLDFARTRLAADVGKAGAEREFRGLGDCLVKIYKSDGIKGLYQGFNVSVQGIIIYRAAYFGIYDTAKGMLPDPKNTHIVISWMIAQTVTAVAGLTSYPFDTVRRRMMMQSGRKGTDIMYTGTLDCWRKIARDEGGKAFFKGAWSNVLRGMGGAFVLVLYDEIKKYT

SEQ ID NO: 1632 - protein, 562 aa, Homo sapiens
MVKIVTVKTQAYQDQKPGTSGLRKRVKVFQSSANYAENFIQSIISTVEPAQRQEATLVVGGDGRFYMKEAIQLIARIAAANGIGRLVIGQNGILSTPAVSCIIRKIKAIGGIILTASHNPGGPNGDFGIKFNISNGGPAPEAITDKIFQISKTIEEYAVCPDLKVDLGVLGKQQFDLENKFKPFTVEIVDSVEAYATMLRSIFDFSALKELLSGPNRLKIRIDAMHGVVGPYVKKILCEELGAPANSAVNCVPLEDFGGHHPDPNLTYAADLVETMKSGEHDFGAAFDGDGDRNMILGKHGFFVNPSDSVAVIAANIFSIPYFQQTGVRGFARSMPTSGALDRVASATKIALYETPTGWKFFGNLMDASKLSLCGEESFGTGSDHIREKDGLWAVLAWLSILATRKQSVEDILKDHWQKYGRNFFTRYDYEEVEAEGANKMMKDLEALMFDRSFVGKQFSANDKVYTVEKADNFEYSDPVDGSISRNQGLRLIFTDGSRIVFRLSGTGSAGATIRLYIDSYEKDVAKINQDPQVMLAPLISIALKVSQLQERTGRTAPTVIT

SEQ ID NO: 1633 - protein, 477 aa, Homo sapiens
MTCSKLLVMELCFGKMINLSVPDTIDERAINKKKLTPFIIQENLNLALNSASAIGCHVVNIGAEDLRAGKPHLVLGLLWQIIKIGLFADIELSRNEALAALLRDGETLEELMKLSPEELLLRWANFHLENSGWQKINNFSADIKDSKAYFHLLNQIAPKGQKEGEPRIDINMSGFNETDDLKRAESMLQQADKLGCRQFVTPADVVSGNPKLNLAFVANLFNKYPALTKPENQDIDWTLLEGETREERTFRNWMNSLGVNPHVNHLYADLQDALVILQLYERIKVPVDWSKVNKPPYPKLGANMKKLENCNYAVELGKHPAKFSLVGIGGQDLNDGNQTLTLALVWQLMRRYTLNVLEDLGDGQKANDDIIVNWVNRTLSEAGKSTSIQSFKDKTISSSLAVVDLIDAIQPGCINYDLVKSGNLTEDDKHNNAKYAVSMARRIGARVYALPEDLVEVKPKMVMTVFACLMGRGMKRV

SEQ ID NO: 1634 - protein, 2321 aa, Homo sapiens
MGPGARGRRRRRRPMSPPPPPPPVRALPLLLLLAGPGAAAPPCLDGSPCANGGRCTQLPSREAACLCPPGWVGERCQLEDPCHSGPCAGRGVCQSSVVAGTARFSCRCPRGFRGPDCSLPDPCLSSPCAHGARCSVGPDGRFLCSCPPGYQGRSCRSDVDECRVGEPCRHGGTCLNTPGSFRCQCPAGYTGPLCENPAVPCAPSPCRNGGTCRQSGDLTYDCACLPGFEGQNCEVNVDDCPGHRCLNGGTCVDGVNTYNCQCPPEWTGQFCTEDVDECQLQPNACHNGGTCFNTLGGHSCVCVNGWTGESCSQNIDDCATAVCFHGATCHDRVASFYCACPMGKTGLLCHLDDACVSNPCHEDAICDTNPVNGRAICTCPPGFTGGACDQDVDECSIGANPCEHLGRCVNTQGSFLCQCGRGYTGPRCETDVNECLSGPCRNQATCLDRIGQFTCICMAGFTGTYCEVDIDECQSSPCVNGGVCKDRVNGFSCTCPSGFSGSTCQLDVDECASTPCRNGAKCVDQPDGYECRCAEGFEGTLCDRNVDDCSPDPCHHGRCVDGIASFSCACAPGYTGTRCESQVDECRSQPCRHGGKCLDLVDKYLCRCPSGTTGVNCEVNIDDCASNPCTFGVCRDGINRYDCVCQPGFTGPLCNVEINECASSPCGEGGSCVDGENGFRCLCPPGSLPPLCLPPSHPCAHEPCSHGICYDAPGGFRCVCEPGWSGPRCSQSLARDACESQPCRAGGTCSSDGMGFHCTCPPGVQGRQCELLSPCTPNPCEHGGRCESAPGQLPVCSCPQGWQGPRCQQDVDECAGPAPCGPHGICTNLAGSFSCTCHGGYTGPSCDQDINDCDPNPCLNGGSCQDGVGSFSCSCLPGFAGPRCARDVDECLSNPCGPGTCTDHVASFTCTCPPGYGGFHCEQDLPDCSPSSCFNGGTCVDGVNSFSCLCRPGYTGAHCQHEADPCLSRPCLHGGVCSAAHPGFRCTCLESFTGPQCQTLVDWCSRQPCQNGGRCVQTGAYCLCPPGWSGRLCDIRSLPCREAAAQIGVRLEQLCQAGGQCVDEDSSHYCVCPEGRTGSHCEQEVDPCLAQPCQHGGTCRGYMGGYMCECLPGYNGDNCEDDVDECASQPCQHGGSCIDLVARYLCSCPPGTLGVLCEINEDDCGPGPPLDSGPRCLHNGTCVDLVGGFRCTCPPGYTGLRCEADINECRSGACHAAHTRDCLQDPGGGFRCLCHAGFSGPRCQTVLSPCESQPCQHGGQCRPSPGPGGGLTFTCHCAQPFWGPRCERVARSCRELQCPVGVPCQQTPRGPRCACPPGLSGPSCRSFPGSPPGASNASCAAAPCLHGGSCRPAPLAPFFRCACAQGWTGPRCEAPAAAPEVSEEPRCPRAACQAKRGDQRCDRECNSPGCGWDGGDCSLSVGDPWRQCEALQCWRLFNNSRCDPACSSPACLYDNFDCHAGGRERTCNPVYEKYCADHFADGRCDQGCNTEECGWDGLDCASEVPALLARGVLVLTVLLPPEELLRSSADFLQRLSAILRTSLRFRLDAHGQAMVFPYHRPSPGSEPRARRELAPEVIGSVVMLEIDNRLCLQSPENDHCFPDAQSAADYLGALSAVERLDFPYPLRDVRGEPLEPPEPSVPLLPLLVAGAVLLLVILVLGVMVARRKREHSTLWFPEGFSLHKDVASGHKGRREPVGQDALGMKNMAKGESLMGEVATDWMDTECPEAKRLKVEEPGMGAEEAVDCRQWTQHHLVAADIRVAPAMALTPPQGDADADGMDVNVRGPDGFTPLMLASFCGGALEPMPTEEDEADDTSASIISDLICQGAQLGARTDRTGETALHLAARYARADAAKRLLDAGADTNAQDHSGRTPLHTAVTADAQGVFQILIRNRSTDLDARMADGSTALILAARLAVEGMVEELIASHADVNAVDELGKSALHWAAAVNNVEATLALLKNGANKDMQDSKEETPLFLAAREGSYEAAKLLLDHFANREITDHLDRLPRDVAQERLHQDIVRLLDQPSGPRSPPGPHGLGPLLCPPGAFLPGLKAAQSGSKKSRRPPGKAGLGPQGPRGRGKKLTLACPGPLADSSVTLSPVDSLDSPRPFGGPPASPGGFPLEGPYAAATATAVSLAQLGGPGRAGLGRQPPGGCVLSLGLLNPVAVPLDWARLPPPAPPGPSFLLPLAPGPQLLNPGTPVSPQERPPPYLAVPGHGEEYPAAGAHSSPPKARFLRVPSEHPYLTPSPESPEHWASPSPPSLSDWSESTPSPATATGAMATTTGALPAQPLPLSVPSSLAQAQTQLGPQPEVTPKRQVLA

SEQ ID NO: 1635 - protein, 1583 aa, Homo sapiens
MKQEVEDSVTKMGDAHKELEQSHINYVKEIENLKNELMAVRSKYSEDKANLQKQLEEAMNTQLELSEQLKFQNNSEDNVKKLQEEIEKIRPGFEEQILYLQKQLDATTDEKKETVTQLQNIIEANSQHYQKNINSLQEELLQLKAIHQEEVKELMCQIEASAKEHEAEINKLNELKENLVKQCEASEKNIQKKYECELENLRKATSNANQDNQICSILLQENTFVEQVVNEKVKHLEDTLKELESQHSILKDEVTYMNNLKLKLEMDAQHIKDEFFHEREDLEFKINELLLAKEEQGCVIEKLKSELAGLNKQFCYTVEQHNREVQSLKEQHQKEISELNETFLSDSEKEKLTLMFEIQGLKEQCENLQQEKQEAILNYESLREIMEILQTELGESAGKISQEFESMKQQQASDVHELQQKLRTAFTEKDALLETVNRLQGENEKLLSQQELVPELENTIKNLQEKNGVYLLSLSQRDTMLKELEGKINSLTEEKDDFINKLKNSHEEMDNFHKKCEREERLILELGKKVEQTIQYNSELEQKVNELTGGLEETLKEKDQNDQKLEKLMVQMKVLSEDKEVLSAEVKSLYEENNKLSSEKKQLSRDLEVFLSQKEDVILKEHITQLEKKLQLMVEEQDNLNKLLENEQVQKLFVKTQLYGFLKEMGSEVSEDSEEKDVVNVLQAVGESLAKINEEKCNLAFQRDEKVLELEKEIKCLQEESVVQCEELKSLLRDYEQEKVLLRKELEEIQSEKEALQSDLLEMKNANEKTRLENQNLLIQVEEVSQTCSKSEIHNEKEKCFIKEHENLKPLLEQKELRDRRAELILLKDSLAKSPSVKNDPLSSVKELEEKIENLEKECKEKEEKINKIKLVAVKAKKELDSSRKETQTVKEELESLRSEKDQLSASMRDLIQGAESYKNLLLEYEKQSEQLDVEKERANNFEHRIEDLTRQLRNSTLQCETINSDNEDLLARIETLQSNAKLLEVQILEVQRAKAMVDKELEAEKLQKEQKIKEHATTVNELEELQVQLQKQKKQLQKTMQELELVKKDAQQTTLMNMEIADYERLMKELNQKLTNKNNKIEDLEQEIKIQKQKQETLQEEITSLQSSVQQYEEKNTKIKQLLVKTKKELADSKQAETDHLILQASLKGELEASQQQVEVYKIQLAEITSEKHKIHEHLKTSAEQHQRTLSAYQQRVTALQEECRAAKAEQATVTSEFESYKVRVHNVLKQQKNKSMSQAETEGAKQEREHLEMLIDQLKIKLQDSQNNLQINVSELQTLQSEHDTLLERHNKMLQETVSKEAELREKLCSIQSENMMMKSEHTQTVSQLTSQNEVLRNSFRDQVRHLQEEHRKTVETLQQQLSKMEAQLFQLKNEPTTRSPVSSQQSLKNLRERRNTDLPLLDMHTVTREEGEGMETTDTESVSSASTYTQSLEQLLNSPETKLEPPLWHAEFTKEELVQKLSSTTKSADHLNGLLRETEATNAILMEQIKLLKSEIRRLERNQEREKSAANLEYLKNVLLQFIFLKPGSERERLLPVINTMLQLSPEEKGKLAAVAQGEEENASRSSGWASYLHSWSGLR

SEQ ID NO: 1636 - protein, 157 aa, Homo sapiens [sequence omitted]

SEQ ID NO: 1637 - protein, 301 aa, Homo sapiens [sequence omitted]

SEQ ID NO: 1638 - protein, 386 aa, Homo sapiens
MGQREMWRLMSRFNAFKRTNTILHHLRMSKHTDAAEEVLLEKKGCTGVITLNRPKFLNALTLNMIRQIYPQLKKWEQDPETFLIIIKGAGGKAFCAGGDIRVISEAEKAKQKIAPVFFREEYMLNNAVGSCQKPYVALIHGITMGGGVGLSVHGQFRVATEKCLFAMPETAIGLFPDVGGGYFLPRLQGKLGYFLALTGFRLKGRDVYRAGIATHFVDSEKLAMLEEDLLALKSPSKENIASVLENYHTESKIDRDKSFILEEHMDKINSCFSANTVEEIIENLQQDGSSFALEQLKVINKMSPTSLKITLRQLMEGSSKTLQEVLTMEYRLSQACMRGHDFHEGVRAVLIDKDQSPKWKPADLKEVTEEDLNNHFKSLGSSDLKF

SEQ ID NO: 1639 - protein, 261 aa, Homo sapiens
MSGALDVLQMKEEDVLKFLAAGTHLGGTNLDFQMEQYIYKRKSDGIYIINLKRTWEKLLLAARAIVAIENPADVSVISSRNTGQRAVLKFAAATGATPIAGRFTPGTFANQIQAAFREPRLLVVTDPRADHQPLMEASYVNLPTIALCNTDSPLHYVDIAIPCNNKGAHSVGLMWWMLAREVLRMRGTISCEHPWEVMPDLYFYRDPEEIEREEQAAAEKAVTKEEFQGEWTAPAPEFTVTQPEVADWSEGVQVPSVPIPY

SEQ ID NO: 1640 - protein, 192 aa, Homo sapiens
MGFGDLKSPAGLQVLNDYLVDKSYIEGYVPSQADVAIFEAVSGPQPAGLCHALRWYNHVKSYEKEKASLPGVKKALGKYGPANVEDATGSGGTDSKDDDDIDLFGSDDEEESEEAKRLREESLAQYESKLAKNPALVAKSSILLNVKPWDKETDLAKLEECVRSIQADGLVWGSSKLVPVGYRIKKPNTVCS

SEQ ID NO: 1641 - protein, 408 aa, Homo sapiens
MNAEEDSEEMPSLLTSTVQVASDNLIPQIRDKEDPQEMPHSPLGSMPEIRDNSPEPNDPEEPQEVSSTPSDKKGKKRKRCIWSTPKRRHKKKSLPGGTASSRHGIQKKLKRVDQVPQKKDDSTCNSTVETRAQKARTECARKSRSEEIIDGTSEMNEGKRSQKTPSTPRRVTQGAASPGHGIQEKLQVVDKVTQRKDDSTWNSEVMMRVQKARTKCARKSRLKEKKKEKDICSSSKRRFQKNIHRRGKPKSDTVDFHCSKLPVTCGEAKGILYKKKMKHGSSVKCIRNEDGTWLTPNEFEVEGKGRNAKNWKRNIRCEGMTLGELLKRKNSDECEVCCQGGQLLCCGTCPRVFHEDCHIPPVEAKRMLWSCTFCRMKRSSGSQQCHHVSKTLERQMQPQDQLNVSSSS

SEQ ID NO: 1642 - protein, 218 aa, Homo sapiens [sequence omitted]

SEQ ID NO: 1643 - protein, 54 aa, Homo sapiens
MALLLNSSWSTSPDLLTSPSSFTKQKLGVAGSQPSAHTARSKASRKQQMRLSVS

SEQ ID NO: 1644 - protein, 161 aa, Homo sapiens [sequence omitted]

SEQ ID NO: 1645 - protein, 926 aa, Homo sapiens
MSRRRKHDDSPSPKKTPHKTVAAEECGSVVEPGRRRLRSARGSWPCGAREGPPGPVRQREQPPTAALCSKSNPEERYETPKRALKMDSLSSSFSSPNDPDGQNDIFWDQNSPLTKQLGKGRKKQIYTTDSDEISHIVNRIAPQDEKPTTNSMLDMWIGETAIPCTPSVAKGKSRAKISCTKLKTQSQEEELMKLAKQFDKNMEELDVIQEQNKRNYDFTQMISETEILSNYKDNIQMWSLHNIVPEIDNATKKPIKGNTKISVANNQNSSQKPFDQIAEAAFNAIFDGSTQKCSGQLSQELPEAFWSTSNTTFVKTNALKEEKIITNETLVIEKLSNKTPRSLSSQVDTPIMTKSCVTSCTKEPETSNKYIDAFTTSDFEDDWENLLGSEPFAMQNIDMPELFPSKTAHVTDQKEICTFNSKTVKNTSRANTSPDARLGDSKVLQDLSSKTYDRELIDAEYRFSPNSNKSNKLSTGNKMKFENSSNKIVIQDEIQNCIVTSNLTKIKEDILTNSTEASERKSALNTRYSNEQKNKCILNQSIKAPVNTDLFGSANLGSKTSVSNPNQTSASKVGSFFDDWNDPSFANEIIKACHQLDNTWEADDVDDDLLYQACDDIERLTQQQDIRKDSKTSESICEINNNSEHGAKLTQQQDIRKDSKTSESICEINNNSEHGAKNMFAISKQGSNLVQSKHLNPGSISVQTSLTNSSQIDKPMKMEKGEMYGNSPRFLGATNLTMYSKISNCQINNLHVSYTNTDVPIQVNSSKLVLPGSSSLNVTSDHMNTEITTYKKKLSTNQPCHKTVTDEAQSNLNTTVGFSKFTFTRMKNSQILSQFNQNCITGSMSDTKITQGVEKKKGVNPLLEEAVGQQSLVKLSESLKQSSKEEEEKNRKCSPEEIQRKRQEALVRRMAKARASSVNAAPTSFL

SEQ ID NO: 1646 - protein, 727 aa, Homo sapiens
MLRIPVRKALVGLSKSPKGCVRTTATAASNLIEVFVDGQSVMVEPGTTVLQACEKVGMQIPRFCYHERLSVAGNCRMCLVEIEKAPKVVAACAMPVMKGWNILTNSEKSKKAREGVMEFLLANHPLDCPICDQGGECDLQDQSMMFGNDRSRFLEGKRAVEDKNIGPLVKTIMTRCIQCTRCIRFASEIAGVDDLGTTGRGNDMQVGTYIEKMFMSELSGNIIDICPVGALTSKPYAFTARPWETRKTESIDVMDAVGSNIVVSTRTGEVMRILPRMHEDINEEWISDKTRFAYDGLKRQRLTEPMVRNEKGLLTYTSWEDALSRVAGMLQSFQGKDVAAIAGGLVDAEALVALKDLLNRVDSDTLCTEEVFPTAGAGTDLRSNYLLNTTIAGVEEADVVLLVGTNPRFEAPLFNARIRKSWLHNDLKVALIGSPVDLTYTYDHLGDSPKILQDIASGSHPFSQVLKEAKKPMVVLGSSALQRNDGAAILAAVSSIAQKIRMTSGVTGDWKVMNILHRIASQVAALDLGYKPGVEAIRKNPPKVLFLLGADGGCITRQDLPKDCFIIYQGHHGDVGAPIADVILPGAAYTEKSATYVNTEGRAQQTKVAVTPPGLAREDWKIIRALSEIAGMTLPYDTLDQVRNRLEEVSPNLVRYDDIEGANYFQQANELSKLVNQQLLADPLVPPQLTIKDFYMTDSISRASQTMAKCVKAVTEGAQAVEEPSIC

SEQ ID NO: 1647 - protein, 293 aa, Homo sapiens [sequence omitted]

SEQ ID NO: 1648 - protein, 173 aa, Homo sapiens
MALRVVRSVRALLCTLRAVPSPAAPCPPRPWQLGVGAVRTLRTGPALLSVRKFTEKHEWVTTENGIGTVGISNFAQEALGDVVYCSLPEVGTKLNKQDEFGALESVKAASELYSPLSGEVTEINEALAENPGLVNKSCYEDGWLIKMTLSNPSELDELMSEEAYEKYIKSIEE

SEQ ID NO: 1649 - protein, 375 aa, Homo sapiens
MAVTEASLLRQCPLLLPQNRSKTVYEGFISAQGRDFHLRIVLPEDLQLKNARLLCSWQLRTILSGYHRIVQQRMQHSPDLMSFMMELKMLLEVALKNRQELYALPPPPQFYSSLIEEIGTLGWDKLVYADTCFSTIKLKAEDASGREHLITLKLKAKYPAESPDYFVDFPVPFCASWTPQSSLISIYSQFLAAIESLKAFWDVMDEIDEKTWVLEPEKPPRSATARRIALGNNVSINIEVDPRHPTMLPECFFLGADHVVKPLGIKLSRNIHLWDPENSVLQNLKDVLEIDFPARAILEKSDFTMDCGICYAYQLDGTIPDQVCDNSQCGQPFHQICLYEWLRGLLTSRQSFNIIFGECPYCSKPITLKMSGRKH

SEQ ID NO: 1650 - protein, 1222 aa, Homo sapiens
MSRQSTLYSFFPKSPALSDANKASARASREGGRAAAAPGASPSPGGDAAWSEAGPGPRPLARSASPPKAKNLNGGLRRSVAPAAPTSCDFSPGDLVWAKMEGYPWWPCLVYNHPFDGTFIREKGKSVRVHVQFFDDSPTRGWVSKRLLKPYTGSKSKEAQKGGHFYSAKPEILRAMQRADEALNKDKIKRLELAVCDEPSEPEEEEEMEVGTTYVTDKSEEDNEIESEEEVQPKTQGSRRSSRQIKKRRVISDSESDIGGSDVEFKPDTKEEGSSDEISSGVGDSESEGLNSPVKVARKRKRMVTGNGSLKRKSSRKETPSATKQATSISSETKNTLRAFSAPQNSESQAHVSGGGDDSSRPTVWYHETLEWLKEEKRRDEHRRRPDHPDFDASTLYVPEDFLNSCTPGMRKWWQIKSQNFDLVICYKVGKFYELYHMDALIGVSELGLVFMKGNWAHSGFPEIAFGRYSDSLVQKGYKVARVEQTETPEMMEARCRKMAHISKYDRVVRREICRIITKGTQTYSVLEGDPSENYSKYLLSLKEKEEDSSGHTRAYGVCFVDTSLGKFFIGQFSDDRHCSRFRTLVAHYPPVQVLFEKGNLSKETKTILKSSLSCSLQEGLIPGSQFWDASKTLRTLLEEEYFREKLSDGIGVMLPQVLKGMTSESDSIGLTPGEKSELALSALGGCVFYLKKCLIDQELLSMANFEEYIPLDSDTVSTTRSGAIFTKAYQRMVLDAVTLNNLEIFLNGTNGSTEGTLLERVDTCHTPFGKRLLKQWLCAPLCNHYAINDRLDAIEDLMVVPDKISEVVELLKKLPDLERLLSKIHNVGSPLKSQNHPDSRAIMYEETTYSKKKIIDFLSALEGFKVMCKIIGIMEEVADGFKSKILKQVISLQTKNPEGRFPDLTVELNRWDTAFDHEKARKTGLITPKAGFDSDYDQALADIRENEQSLLEYLEKQRNRIGCRTIVYWGIGRNRYQLEIPENFTTRNLPEEYELKSTKKGCKRYWTKTIEKKLANLINAEERRDVSLKDCMRRLFYNFDKNYKDWQSAVECIAVLDVLLCLANYSRGGDGPMCRPVILLPEDTPPFLELKGSRHPCITKTFFGDDFIPNDILIGCEEEEQENGKAYCVLVTGPNMGGKSTLMRQAGLLAVMAQMGCYVPAEVCRLTPIDRVFTRLGASDRIMSGESTFFVELSETASILMHATAHSLVLVDELGKRYCNI

SEQ ID NO: 1651 - protein, 114 aa, Homo sapiens
MYYKFSGFTQKLAGAWASEAYSPQGLKPVVSTEAPPIIFATPTKLTSDSTVYDYAGKNKVPELQKFFQKADGVPVYLKRGLPDQMLYRTTMALTVGGTIYCLIALYMASQPKNK

SEQ ID NO: 1652 - protein, 218 aa, Homo sapiens
MPMTLGYWDIRGLAHAIRLLLEYTDSSYVEKKYTLGDAPDYDRSQWLNEKFKLGLDFPNLPYLIDGAHKITQSNAILRYIARKHNLCGETEEEKIRVDILENQVMDNHMELVRLCYDPDFEKLKPKYLEELPEKLKLYSEFLGKRPWFAGDKITFVDFLAYDVLDMKRIFEPKCLDAFLNLKDFISRFEGLKKISAYMKSSQFLRGLLFGKSATWNSK

SEQ ID NO: 1653 - protein, 497 aa, Homo sapiens
MADPEVVVSSCSSHEEENRCNFNQQTSPSEELLLEDQMRRKLKFFFMNPCEKFWARGRKPWKLAIQILKIAMVTIQYLQLYNVSVGNHAYENKGTKQSAMAICQHFYKRGNIYPGNDTFDIDPEIETECFFVEPDEPFHIGTPAENKLNLTLDFHRLLTVELQFKLKAINLQTVRHQELPDCYDFTLTITFDNKAHSGRIKISLDNDISIRECKDWHVSGSIQKNTHYMMIFDAFVILTCLVSLILCIRSVIRGLQLQQEFVNFFLLHYKKEVSVSDQMEFVNGWYIMIIISDILTIIGSILKMEIQAKSLTSYDVCSILLGTSTMLVWLGVIRYLGFFAKYNLLILTLQAALPNVIRFCCCAAMIYLGYCFCGWIVLGPYHDKFRSLNMVSECLFSLINGDDMFATFAKMQQKSYLVWLFSRIYLYSFISLFIYMILSLFIALITDTYETIKQYQQDGFPETELRTFISECKDLPNSGKYRLEDDPPVSLFCCCKK

SEQ ID NO: 1654 - protein, 352 aa, Homo sapiens
MTGTHLHRTIKTYLQQIGVDMDKIHGQAYDSTTNLKIKFNKIAAEFKKEEPRALYIHCYAHFLDLSIIRFCKEVKELRSALKTLSSLFNTICMSGEMLANFRNIYRLSQNKTCKKHISQSCWTVHDRTLLSVIDSLPEIIETLEVIASHSSNTSFADELSHLLTLVSKFEFVFCLKFLYRVLSVTGILSKELQNKTIDIFSLSSKIEAILECLSSERNDVYFKTIWDGTEEICQKITCKGFKVEKPSLQKRRKIQKSVDLGNSDMFFPTSTEEQYKINIYYQGLDTILQNLKLCFSEFDYCKIKQISELLFKWNDPLNDTTAKHGSGHFIILDEDIIPELRFYRPHAHLTLS

SEQ ID NO: 1655 - protein, 1042 aa, Homo sapiens
MAQKLVQAEREAQASLREQRAAHEEDLQRLQREKEAAWRELEAERAQLQSQLQREQEELLARLEAEKEELSEEIAALQQERDEGLLLAESEKQQALSLKESEKTALSEKLMGTRHSLATISLEMERQKRDAQSRQEQDRSTVNALTSELRDLRAQREEAAAAHAQEVRRLQEQARDLGKQRDSCLREAEELRTQLRLLEDARDGLRRELLEAQRKLRESQEGREVQRQEAGELRRSLGEGAKEREALRRSNEELRSAVKKAESERISLKLANEDKEQKLALLEEARTAVGKEAGELRTGLQEVERSRLEARRELQELRRQMKMLDSENTRLGRELAELQGRLALGERAEKESRRETLGLRQRLLKGEASLEVMRQELQVAQRKLQEQEGEFRTRERRLLGSLEEARGTEKQQLDHARGLELKLEAARAEAAELGLRLSAAEGRAQGLEAELARVEVQRRAAEAQLGGLRSALRRGLGLGRAPSPAPRPVPGSPARDAPAEGSGEGLNSPSTLECSPGSQPPSPGPATSPASPDLDPEAVRGALREFLQELRSAQRERDELRTQTSALNRQLAEMEAERDSATSRARQLQKAVAESEEARRSVDGRLSGVQAELALQEESVRRSERERRATLDQVATLERSLQATESELRASQEKISKMKANETKLEGDKRRLKEVLDASESRTVKLELQRRSLEGELQRSRLGLSDREAQAQALQDRVDSLQRQVADSEVKAGTLQLTVERLNGALAKVEESEGALRDKVRGLTEALAQSSASLNSTRDKNLHLQKALTACEHDRQVLQERLDAARQALSEARKQSSSLGEQVQTLRGEVADLELQRVEAEGQLQQLREVLRQRQEGEAAALNTVQKLQDERRLLQERLGSLQRALAQLEAEKREVERSALRLEKDRVALRRTLDKVEREKLRSHEDTVRLSAEKGRLDRTLTGAELELAEAQRQIQQLEAQVVVLEQSHSPAQLEVDAQQQQLELQQEVERLRSAQAQTERTLEARERAHRQRVSTLKGQLQQELRRSSAPFSPPSGPPEK

SEQ ID NO: 1656 - protein, 280 aa, Homo sapiens
MAAVVALSLRRRLPATTLGGACLQASRGAQTAAATAPRIKKFAIYRWDPDKAGDKPHMQTYEVDLNKCGPMVLDALIKIKNEVDSTLTFRRSCREGICGSCAMNINGGNTLACTRRIDTNLNKVSKIYPLPHMYVIKDLVPDLSNFYAQYKSIEPYLKKKDESQEGKQQYLQSIEEREKLDGLYECILCACCSTSCPSYWWNGDKYLGPAVLMQAYRWMIDSRDDFTEERLAKLQDPFSLYRCHTIMNCTRTCPKGLNPGKAIAEIKKMMATYKEKKASV

SEQ ID NO: 1657 - protein, 220 aa, Homo sapiens
MIEAEISFVDSLQDLMQVIEELFKATTMMVLSKCPEDVELCHKFIAPGQKDRLEHMLKNNFLIISYTEAVEILKQASQNFTFTPEWGADLRTEHEKYLVKHCGNIPVFVINYPLTLKPFYMRDNEDGPQHTVAAVDLLVPGVGELFGGGLREERYHFLEERLARSGLTEVYQWYLDLRRFGSVPHGGFGMGFERYLQCILGVDNIKDVIPFPRFPHSCLL

SEQ ID NO: 1658 - protein, 176 aa, Homo sapiens
MQKKSSAMEGVSTRRVSTAWPAGRLLTARQSRLMSRRSTARCAMGADMAPKGSGMDKALAVSAQTRASISACSSNRSPKPARSVTTSNPSKFTAKFGESEKCPRCGKSVYAAEKVMGGGKPWHKTCFRCAICGKSLESTNVTDKDGELYCKVCYAKNFGPTGIGFGGLTQQVEKKE

SEQ ID NO: 1659 - protein, 337 aa, Homo sapiens
MGNVLQGGEGQAPTRQAVLGAGLPISTPCTTINKVCASGMKAIMMASQSLMCGHQDVMVAGGMESMSNVPYVMNRGSTPYGGVKLEDLIVKDGLTDVYNKIHMGSCAENTAKKLNIARNEQDAYAINSYTRSKAAWEAGKFGNEVIPVTVTVKGQPDVVVKEDEEYKRVDFSKVPKLKTVFQKENGTVTAANASTLNDGAAALVLMTADAAKRLNVTPLARIVAFADAAVEPIDFPIAPVYAASMVLKDVGLKKEDIAMWEVNEAFSLVVLANIKMLEIDPQKVNINGGAVSLGHPIGMSGARIVGHLTHALKQGEYGLASICNGGGGASAMLIQKL

SEQ ID NO: 1660 - protein, 494 aa, Homo sapiens
MTLQDRNEKLFYRVLTSDVEKFMPIVYTPTVGLACQHYGLTFRRPRGLFITIHDKGHLATMLNSWPEDNIKAVVVTDGERILGLGDLGCYGMGIPVGKLALYTACGGVNPQQCLPVLLDVGTNNEELLRDPLYIGLKHQRVHGKAYDDLLDEFMQAVTDKFGINCLIQFEDFANANAFRLLNKYRNKYCMFNDDIQGTASVAVAGILAALRITKNKLSNHVFVFQGAGEAAMGIAHLLVMALEKEGVPKAEATRKIWMVDSKGLIVKGRSHLNHEKEMFAQDHPEVNSLEEVVRLVKPTAIIGVAAIAGAFTEQILRDMASFHERPIIFALSNPTSKAECTAEKCYRVTEGRGIFASGSPFKSVTLEDGKTFIPGQGNNAYVFPGVALGVIAGGIRHIPDEIFLLTAEQIAQEVSEQHLSQGRLYPPLSTIRDVSLRIAIKVLDYAYKHNLASYYPEPKDKEAFVRSLVYTPDYDSFTLDSYTWPKEAMNVQTV

SEQ ID NO: 1661 - protein, 1019 aa, Homo sapiens
MAQISSNSGFKECPSSHPEPTRAKDVDKEEALQMEAEALAKLQKDRQVTDNQRGFELSSSTRKKAQVYNKQDYDLMVFPESDSQKRALDIDVEKLTQAELEKLLLDDSFETKKTPVLPVTPILSPSFSAQLYFRPTIQRGQWPPGLPGPSTYALPSIYPSTYSKQAAFQNGFNPRMPTFPSTEPIYLSLPGQSPYFSYPLTPATPFHPQGSLPIYRPVVSTDMAKLFDKIASTSEFLKNGKARTDLEITDSKVSNLQVSPKSEDISKFDWLDLDPLSKPKVDNVEVLDHEEEKNVSSLLAKDPWDAVLLEERSTANCHLERKVNGKSLSVATVTRSQSLNIRTTQLAKAQGHISQKDPNGTSSLPTGSSLLQEVEVQNEEMAAFCRSITKLKTKFPYTNHRTNPGYLLSPVTAQRNICGENASVKVSIDIEGFQLPVTFTCDVSSTVEIIIMQALCWVHDDLNQVDVGSYVLKVCGQEEVLQNNHCLGSHEHIQNCRKWDTEIRLQLLTFSAMCQNLARTAEDDETPVDLNKHLYQIEKPCKEAMTRHPVEELLDSYHNQVELALQIENQHRAVDQVIKAVRKICSALDGVETLAITESVKKLKRAVNLPRSKTADVTSLFGGEDTSRSSTRGSLNPENPVQVSINQLTAAIYDLLRLHANSGRSPTDCAQSSKSVKEAWTTTEQLQFTIFAAHGISSNWVSNYEKYYLICSLSHNGKDLFKPIQSKKVGTYKNFFYLIKWDELIIFPIQISQLPLESVLHLTLFGILNQSSGSSPDSNKQRKGPEALGKVSLPLFDFKRFLTCGTKLLYLWTSSHTNSVPGTVTKKGYVMERIVLQVDFPSPAFDIIYTTPQVDRSIIQQHNLETLENDIKGKLLDILHKDSSLGLSKEDKAFLWEKRYYCFKHPNCLPKILASAPNWKWVNLAKTYSLLHQWPALYPLIALELLDSKFADQEVRSLAVTWIEAISDDELTDLLPQFVQALKYEIYLNSSLVQFLLSRALGNIQIAHNLYWASQRCPA

SEQ ID NO: 1662 - protein, 185 aa, Homo sapiens
MSSSCSGLSRVLVAVATALVSASSPCPQAWGPPGVQYGQPGRSVKLCCPGVTAGDPVSWFRDGEPKLLQGPDSGLGHELVLAQADSTDEGTYICQTLDGALGGTVTLQLGYPPARPVVSCQAADYENFSCTWSPSQISGLPTRYLTSYRKKTVLGADSQREESIHRALAMPTGSPRGCPLCCPRG

SEQ ID NO: 1663 - protein, 346 aa, Homo sapiens
MGPAVSPWTRRAPCRGLPDPRCPGHSGGSRGQQLPVSSFRGIKGGRRSISFSVGASSVVGSGGSSDKGKLSLQDVAELIRARACQRVVVMVGAGISTPSGIPDFRSPGSGLYSNLQQYDLPYPEAIFELPFFFHNPKPFFTLAKELYPGNYKPNVTHYFLRLLHDKGLLLRLYTQNIDGLERVSGIPASKLVEAHGTFASATCTVCQRPFPGEDIRADVMADRVPRCPVCTGVVKPDIVFFGEPLPQRFLLHVVDFPMADLLLILGNSLEVEPFASLTEAVRSSVPRLLINRDLVGPLAWHPRSRDVAQLGDVVHGVESLVELLGWTEEMRDLVQRETGKLDGPDK

SEQ ID NO: 1664 - protein, 672 aa, Homo sapiens
MCYKQAVSVDEMRGTITVHKTDSSNEPPKTFTFDTVFGPESKQLDVYNLTARPIIDSVLEGYNGTIFAYGQTGTGKTFTMEGVRAIPELRGIIPNSFAHIFGHIAKAEGDTRFLVRVSYLEIYNEEVRDLLGKDQTQRLEVKERPDVGVYIKDLSAYVVNNADDMDRIMTLGHKNRSVGATNMNEHSSRSHAIFTITIECSEKGIDGNMHVRMGKLHLVDLAGSERQAKTGATGQRLKEATKINLSLSTLGNVISALVDGKSTHVPYRNSKLTRLLQDSLGGNSKTMMCANIGPADYNYDETISTLRYANRAKNIKNKARINEDPKDALLRQFQKEIEELKKKLEEGEEISGSDISGSEEDDDEEGEVGEDGEKRKKRRIQIGKKKVSPDKMIEMQAKIDEERKALETKLDMEEEERNKARAELEKREKDLLKAQQEHQSLLEKLSALEKKVIVGGVDLLAKAEEQEKLLEESNMELEERRKRAEQLRRELEEKEQERLDIEEKYTSLQEEAQGKTKKLKKVWTMLMAAKSEMADLQQEHQREIEGLLENIRQLSRELRLQMLIIDNFIPRDYQEMIENYVHWNEDIGEWQLKCVAYTGNNMRKQTPVPDKKEKDPFEVDLSHVYLAYTEESLRQSLMKLERPRTSKGKARPKTGRRKRSAKPETVIDSLLQ

SEQ ID NO: 1665 - protein, 81 aa, Homo sapiens
MPNTGYGSNKKTKHMLPSGFRKFLVHNVKELEVLLMCNNRTCAEIAHNVSSKNRKAIVERAAQLAITVTNPSARLCSEENE

SEQ ID NO: 1666 - protein, 250 aa, Homo sapiens
MNDLRVPFIRDNLLKTIPNHQPGKPLLGMKILDVGCGGGLLTEPLGRLGASVIGIDPVDENIKTAQCHKSFDPVLDKRIEYRVCSLEEIVEETAETFDAVVASEVVEHVIDLETFLQCCCQVLKPGGSLFITTINKTQLSYALGIVFSEQIASIVPKGTHTWEKFVSPETLESILESNGLSVQTVVGMLYNPFSGYWHWSENTSLNYAAYAVKSRVQEHPASAEFVLKGETEELQANACTNPAVHEKLKK

SEQ ID NO: 1667 - protein, 165 aa, Homo sapiens [sequence omitted]

SEQ ID NO: 1668 - protein, 91 aa, Homo sapiens
MACTTPVRIISGPASRTLCAPSFLGINWKTRIPACTFPPGRSEMPTPASTKARSAAWSPASISPFARKTASKSTYTHSKKGRKSPKVTKTF

SEQ ID NO: 1669 - protein, 372 aa, Homo sapiens [sequence omitted]

SEQ ID NO: 1670 - protein, 344 aa, Homo sapiens
MLERIKHEKTVDIYGHVTLMRAQRNYMVQTEDQYIFIHDALLEAVTCGNTEVPARNLYAYIQKLTQIETGENVTGMELEFKRLASSKAHTSRFISANLPCNKFKNRLVNIMPYESTRVCLQPIRGVEGSDYINASFIDGYRQQKAYIATQGPLAETTEDFWRMLWEHNSTIVVMLTKLREMGREKCHQYWPAERSARYQYFVVDPMAEYNMPQYILREFKVTDARDGQSRTVRQFQFTDWPEQGVPKSGEGFIDFIGQVHKTKEQFGQDGPISVHCSAGVGRTGVFITLSIVLERMRYEGVVDIFQTVKMLRTQRPAMVQTEDQYQFSYRAALEYLGSFDHYAT

SEQ ID NO: 1671 - protein, 953 aa, Homo sapiens
MITSAAGIISLLDEDEPQLKEFALHKLNAVVNDFWAEISESVDKIEVLYEDEGFRSRQFAALVASKVFYHLGAFEESLNYALGAGDLFNVNDNSEYVETIIAKCIDHYTKQCVENADLPEGEKKPIDQRLEGIVNKMFQRCLDDHKYKQAIGIALETRRLDVFEKTILESNDVPGMLAYSLKLCMSLMQNKQFRNKVLRVLVKIYMNLEKPDFINVCQCLIFLDDPQAVSDILEKLVKEDNLLMAYQICFDLYESASQQFLSSVIQNLRTVGTPIASVPGSTNTGTVPGSEKDSDSMETEEKTSSAFVGKTPEASPEPKDQTLKMIKILSGEMAIELHLQFLIRNNNTDLMILKNTKDAVRNSVCHTATVIANSFMHCGTTSDQFLRDNLEWLARATNWAKFTATASLGVIHKGHEKEALQLMATYLPKDTSPGSAYQEGGGLYALGLIHANHGGDIIDYLLNQLKNASNDIVRHGGSLGLGLAAMGTARQDVYDLLKTNLYQDDAVTGEAAGLALGLVMLGSKNAQAIEDMVGYAQETQHEKILRGLAVGIALVMYGRMEEADALIESLCRDKDPILRRSGMYTVAMAYCGSGNNKAIRRLLHVAVSDVNDDVRRAAVESLGFILFRTPEQCPSVVSLLSESYNPHVRYGAAMALGICCAGTGNKEAINLLEPMTNDPVNYVRQGALIASALIMIQQTEITCPKVNQFRQLYSKVINDKHDDVMAKFGAILAQGILDAGGHNVTISLQSRTGHTHMPSVVGVLVFTQFWFWFPLSHFLSLAYTPTCVIGLNKDLKMPKVQYKSNCKPSTFAYPAPLEVPKEKEKEKVSTAVLSITAKAKKKEKEKEKKEEEKMEVDEAEKKEEKEKKKEPEPNFQLLDNPARVMPAQLKVLTMPETCRYQPFKPLSIGGIIILKDTSEDIEELVEPVAAHGPKIEEEEQEPEPPEPFEYIDD

SEQ ID NO: 1672 - protein, 407 aa, Homo sapiens
MQQKAFEESRYPWQESFENVAVCLPLRCPRCGDHTRFRSLSSLRAHLEFSHSYEERTLLTKCSLFPSLKDTDLVTSSELLKPGKLQSSGNVVKQKPSYVNLYSISHEHSKDRKPFEVVAERPVSYVQTYTAMDLHADSLDGTRSGPGLPTSDTKASFEAHVREKFNRMVEAVDRTIEKRIDKLTKELAQKTAELLEVRAAFVQLTQKKQEVQRRERALNRQVDVAVEMIAVLRQRLTESEEELLRKEEEVVTFNHFLEAAAEKEVQGKARLQDFIENLLQRVELAEKQLEYYQSQQASGFVRDLSGHVLTDISSNRKPKCLSRGHPHSVCNHPDLKAHFHPKGRNHLKKAKDDRASMQPAKAIHEQAESSRDLCRPPKKGELLGFGRKGNIRPKMAKKKPTAIVNII

SEQ ID NO: 1673 - protein, 526 aa, Homo sapiens
MAVFPSSGLPRCLLTLILLQLPKLDSAPFDVIGPPEPILAVVGEDAELPCRLSPNASAEHLELRWFRKKVSPAVLVHRDGREQEAEQMPEYRGRATLVQDGIAKGRVALRIRGVRVSDDGEYTCFFREDGSYEEALVHLKVAALGSDPHISMQVQENGEICLECTSVGWYPEPQVQWRTSKGEKFPSTSESRNPDEEGLFTVAASVIIRDTSAKNVSCYIQNLLLGQEKKVEISIPASSLPRLTPWIVAVAVILMVLGLLTIGSIFFTWRLYNERPRERRNEFSSKERLLEELKWKKATLHAVDVTLDPDTAHPHLFLYEDSKSVRLEDSRQKLPEKTERFDSWPCVLGRETFTSGRHYWEVEVGDRTDWAIGVCRENVMKKGFDPMTPENGFWAVELYGNGYWALTPLRTPLPLAGPPRRVGIFLDYESGDISFYNMNDGSDIYTFSNVTFSGPLRPFFCLWSSGKKPLTICPIADGPERVTVIANAQDLSKEIPLSPMGEDSAPRDADTLHSKLIPTQPSQGAP

SEQ ID NO: 1674 - protein, 2060 aa, Homo sapiens
MGKQTGAVRPQEFRCLNRSAAGIAATAGFTDACLQPAETTPSSPRDTPLVPSGVKSWAQASVTHGAHGDGGRASSLLSRFSREEFPTLQAAGDQDKAAKERESAEQSSGPGPSLRPQNSTTWRDGGGRGPDELEGPDSKLHHGHDPRGGLQPSGPPQFPPYRGMMPPFMYPPYLPFPPPYGPQGPYRYPTPDGPSRFPRVAGPRGSGPPMRLVEPVGRPSILKEDNLKEFDQLDQENDDGWAGAHEEVDYTEKLKFSDEEDGRDSDEEGAEGHRDSQSASGEERPPEADGKKGNSPNSEPPTPKTAWAETSRPPETEPGPPAPKPPLPPGDYPDRGGPPCKPPAPEDEDEAWRQRRKQSSSEISLAVERARRRREEEERRMQEERRAACAEKLKRLDEKFGAPDKRLKAEPAAPPAAPSTPAPPPAVPKELPAPPAPPPASAPTPEKEPEEPAQAPPAQSTPTPGVAAAPTLVSGGGSTSSTSSGSFEASPVEPQLPSKEGPEPPEEVPPPTTPPVPKVEPKGDGIGPTRQPPSQGLGYPKYQKSLPPRFQRQQQEQLLKQQQQHQWQQHQQGSAPPTPVPPSPPQPVTLGAVPAPQAPPPPPKALYPGALGRPPPMPPMNFDPRWMMIPPYVDPRLLQGRPPLDFYPPGVHPSGLVPRERSDSGGSSSEPFDRHAPAMLRERGTPPVDPKLAWVGDVFTATPAEPRPLTSPLRQAADEDDKGMRSETPPVPPPPPYLASYPGFPENGAPGPPISRFPLEEPGPRPLPWPPGSDEVAKIQTPPPKKEPPKEETAQLTGPEAGRKPARGVGSGGQGPPPPRRESRTETRWGPRPGSSRRGIPPEEPGAPPRRAGPIKKPPPPTKVEELPPKPLEQGDETPKPPKPDPLKITKGKLGGPKETPPNGNLSPAPRLRRDYSYERVGPTSCRGRGRGEYFARGRGFRGTYGGRGRGARSREFRSYREFRGDDGRGGGTGGPNHPPAPRGRTASETRSEGSEYEEIPKRRRQRGSETGSETHESDLAPSDKEAPTPKEGTLTQVPLAPPPPGAPPSPAPARFTARGGRVFTPRGVPSRRGRGGGRPPPQVCPGWSPPAKSLAPKKPPTGPLPPSKEPLKEKLIPGPLSPVARGGSNGGSNVGMEDGERPRRRRHGRAQQQDKPPRFRRLKQERENAARGSEGKPSLTLPASAPAPEEALTTVTVAPAPRRAAAKSPDLSNQNSDQANEEWETASESSDFTSERRGDKEAPPPVLLTPKAVGTPGGGGGGAVPGISAMSRGDLSQRAKDLSKRSFSSQRPGMERQNRRPGPGGKAGSSGSSSGGGGGGPGGRTGPGRGDKRSWPSPKNRSRPPEERPPGLPLPPPPPSSSAVFRLDQVIHSNPAGIQQALAQLSSRQGSVTAPGGHPRHKPGPPQAPQGPSPRPPTRYEPQRVNSGLSSDPHFEEPGPMVRGVGGTPRDSAGVSPFPPKRRERPPRKPELLQEESLPPPHSSGFLGSKPEGPGPQAESRDTGTEALTPHIWNRLHTATSRKSYRPSSMEPWMEPLSPFEDVAGTEMSQSDSGVDLSGDSQVSSGPCSQRSSPDGGLKGAAEGPPKRPGGSSPLNAVPCEGPPGSEPPRRPPPAPHDGDRKELPREQPLPPGPIGTERSQHTDRGTEPGPIRPSHRPGPPVQFGTSDKDSDLRLVVGDSLKAEKELTASVTEAIPVSRDWELLPSAAASAEPQSKNLDSGHCVPEPSSSGQRLYPEVFYGSAGPSSSQISGGAMDSQLHPNSGGFRPGTPSLHPYRSQPLYLPPGPAPPSALLSGVALKGQFLDFSTMQATELGKLPAGGVLYPPPSFLYSPAFCPSPLPDTSLLQVRQDLPSPSDFYSTPLQPGGQSGFLPSGAPAQQMLLPMVDSQLPVVNFGSLPPAPPPAPPPLSLLPVGPALQPPSLAVRPPPAPATRVLPSPARPFPASLGRAELHPVELKPFQDYQKLSSNLGGPGSSRTPPTGRSFSGLNSRLKATPSTYSGVFRTQRVDLYQQASPPDALRWIPKPWERTGLPPREGPSRRAEEPGSRGDKEPGLPPPR

SEQ ID NO: 1675 - protein, 641 aa, Homo sapiens
MATAKGIAIGIDLGTTYSCVGVFQHGKVEIIANDQGNRTTPSYVAFTDTERLIGDAAKNQVAMNPQNTVFDAKRLIGRKFNDPVVQADMKLWPFQVINEGGKPKVLVSYKGENKAFYPEEISSMVLTKLKETAEAFLGHPVTNAVITVPAYFNDSQRQATKDAGVIAGLNVLRIINEPTAAAIAYGLDKGGQGERHVLIFDLGGGTFDVSILTIDDGIFEVKATAGDTHLGGEDFDNRLVSHFVEEFKRKHKKDISQNKRAVRRLRTACERAKRTLSSSTQANLEIDSLYEGIDFYTSITRARFEELCADLFRGTLEPVEKALRDAKMDKAKIHDIVLVGGSTRIPKVQRLLQDYFNGRDLNKSINPDEAVAYGAAVQAAILMGDKSEKVQDLLLLDVAPLSLGLETAGGVMTALIKRNSTIPTKQTQIFTTYSDNQPGVLIQVYEGERAMTKDNNLLGRFDLTGIPPAPRGVPQIEVTFDIDANGILNVTAMDKSTGKVNKITITNDKGRLSKEEIERMVLDAEKYKAEDEVQREKIAAKNALESYAFNMKSVVSDEGLKGKISESDKNKILDKCNELLSWLEVNQLAEKDEFDHKRKELEQMCNPIITKLYQGGCTGPACGTGYVPGRPATGPTIEEVD

SEQ ID NO: 1676 - protein, 532 aa, Homo sapiens
MEDGLIKQIGDNLIVPGGVKTIEANGKMVIPGGIDVHTHFQMPYKGMTTVDDFFQGTKAALAGGTTMIIDHVVPEPESSLTEAYEKWREWADGKSCCDYALHVDITHWNDSVKQEVQNLIKDKGVNSFMVYMAYKDLYQVSNTELYEIFTCLGELGAIAQVHAENGDIIAQEQTRMLEMGITGPEGHVLSRPEELEAEAVFRAITIASQTNCPLYVTKVMSKSAADLISQARKKGNVVFGEPITASLGIDGTHYWSKNWAKAAAFVTSPPLSPDPTTPDYINSLLASGDLQLSGSAHCTFSTAQKAIGKDNFTAIPEGTNGVEERMSVIWDKAVATGKMDENQFVAVTSTNAAKIFNLYPRKGRISVGSDSDLVIWDPDAVKIVSAKNHQSAAEYNIFEGMELRGAPLVVICQGKIMLEDGNLHVTQGAGRFIPCSPFSDYVYKRIKARRKMADLHAVPRGMYDGPVFDLTTTPKGGTPAGSARGSPTRPNPPVRNLHQSGFSLSAPKWMRGFAQPASASWRPQAAVLISHL

SEQ ID NO: 1677 - protein, 419 aa, Homo sapiens
MASIFSKLLTGRNASLLFATMGTSVLTTGYLLNRQKVCAEVREQPRLFPPSADYPDLRKHNNCMAECLTPAIYAKLRNKVTPNGYTLDQCIQTGVDNPGHPFIKTVGMVAGDEESYEVFADLFDPVIKLRHNGYDPRVMKHTTDLDASKITQGQFDEHYVLSSRVRTGRSIRGLSLPPACTRAERREVENVAITALEGLKGDLAGRYYKLSEMTEQDQQRLIDDHFLFDKPVSPLLTCAGMARDWPDARGIWHNYDKTFLIWINEEDHTRVISMEKGGNMKRVFERFCRGLKEVERLIQERGWEFMWNERLGYILTCPSNLGTGLRAGVHVRIPKLSKDPRFSKILENLRLQKRGTGGVDTAAVADVYDISNIDRIGRSEVELVQIVIDGVNYLVDCEKKLERGQDIKVPPPLPQFGKK

SEQ ID NO: 1678 - protein, 244 aa, Homo sapiens
MAAAAAAGEARRVLVYGGRGALGSRCVQAFRARNWWVASVDVVENEEASASIIVKMTDSFTEQADQVTAEVGKLLGEEKVDAILCVAGGWAGGNAKSKSLFKNCDLMWKQSIWTSTISSHLATKHLKEGGLLTLAGAKAALDGTPGMIGYGMAKGAVHQLCQSLAGKNSGMPPGAAAIAVLPVTLDTPMNRKSMPEADFSSWTPLEFLVETFHDWITGKNRPSSGSLIQVVTTEGRTELTPAYF

SEQ ID NO: 1679 - protein, 314 aa, Homo sapiens
MAFVTRQFMRSVSSSSTASASAKKIIVKHVTVIGGGLMGAGIAQVAAATGHTVVLVDQTEDILAKSKKGIEESLRKVAKKKFAENPKAGDEFVEKTLSTIATSTDAASVVHSTDLVVEAIVENLKVKNELFKRLDKFAAEHTIFASNTSSLQITSIANATTRQDRFAGLHFFNPVPVMKLVEVIKTPMTSQKTFESLVDFSKALGKHPVSCKDTPGFIVNRLLVPYLMEAIRLYERGDASKEDIDTAMKLGAGYPMGPFELLDYVGLDTTKFIVDGWHEMDAENPLHQPSPSLNKLVAENKFGKKTGEGFYKYK

SEQ ID NO: 1680 - protein, 298 aa, Homo sapiens
MGDHAWSFLKDFLAGGVAAAVSKTAVAPIERVKLLLQVQHASKQISAEKQYKGIIDCVVRIPKEQGFLSFWRGNLANVIRYFPTQALNFAFKDKYKQLFLGGVDRHKQFWRYFAGNLASGGAAGATSLCFVYPLDFARTRLAADVGKGAAQREFHGLGDCIIKIFKSDGLRGLYQGFNVSVQGIIIYRAAYFGVYDTAKGMLPDPKNVHIFVSWMIAQSVTAVAGLVSYPFDTVRRRMMMQSGRKGADIMYTGTVDCWRKIAKDEGAKAFFKGAWSNVLRGMGGAFVLVLYDEIKKYV

SEQ ID NO: 1681 - protein, 569 aa, Homo sapiens
MKKKLVVLGLLAVVLVLVIVGLCLWLPSASKEPDNHVYTRAAVAADAKQCSKIGRDALRDGGSAVDAAIAALLCVGLMNAHSMGIGGGLFLTIYNSTTRKAEVINAREVAPRLAFATMFNSSEQSQKGGLSVAVPGEIRGYELAHQRHGRLPWARLFQPSIQLARQGFPVGKGLAAALENKRTVIEQQPVLCEVFCRDRKVLREGERLTLPQLADTYETLAIEGAQAFYNGSLTAQIVKDIQAAGGIVTAEDLNNYRAELIEHPLNISLGDVVLYMPSAPLSGPVLALILNILKGYNFSRESVESPEQKGLTYHRIVEAFRFAYAKRTLLGDPKFVDVTEVVRNMTSEFFAAQLRAQISDDTTHPISYYKPEFYTPDDGGTAHLSVVAEDGSAVSATSTINLYFGSKVRSPVSGILFNNEMDDFSSPSITNEFGVPPSPANFIQPGKQPLSSMCPTIMVGQDGQVRMVVGAAGGTQITTATALAIIYNLWFGYDVKRAVEEPRLHNQLLPNVTTVERNIDQAVTAALETRHHHTQIASTFIAVVQAIVRTAGGWAAASDSRKGGEPAGY

SEQ ID NO: 1682 - protein, 455 aa, Homo sapiens
MSEASSEDLVPPLEAGAAPYREEEEAAKKKKEKKKKSKGLANVFCVFTKGKKKKGQPSSAEPEDAAGSRQGLDGPPPTVEELKAALERGQLEAARPLLALERELAAAAAAGGVSEEELVRRQSKVEALYELLRDQVLGVLRRPLEAPPERLRQALAVVAEQEREDRQAAAAGPGTSGLAATRPRRWLQLWRRGVAEAAEERMGQRPAAGAEVPESVFLHLGRTMKEDLEAVVERLKPLFPAEFGVVAAYAESYHQHFAAHLAAVAQFELCERDTYMLLLWVQNLYPNDIINSPKLVGELQGMGLGSLLPPRQIRLLEATFLSSEAANVRELMDRALELEARRWAEDVPPQRLDGHCHSELAIDIIQITSQAQAKAESITLDLGSQIKRVLLVELPAFLRSYQRAFNEFLERGKQLTNYRANVIANINNCLSFRDVHGAELAGTPGHPEPPAGPPG

SEQ ID NO: 1683 - protein, 1051 aa, Homo sapiens
MDRNREAEMELRRGPSPTRAGRGHEVDGDKATCHTCCICGKSFPFQSSLSQHMRKHTGEKPYKCPYCDHRASQKGNLKIHIRSHRTGTLIQGHEPEAGEAPLGEMRASEGLDACASPTKSASACNRLLNGASQADGARVLNGASQADSGRVLLRSSKKGAEGSACAPGEAKAAVQCSFCKSQFERKKDLELHVHQAHKPFKCRLCSYATLREESLLSHIERDHITAQGPGSGEACVENGKPELSPGEFPCEVCGQAFSQTWFLKAHMKKHRGSFDHGCHICGRRFKEPWFLKNHMKAHGPKTGSKNRPKSELDPIATINNVVQEEVIVAGLSLYEVCAKCGNLFTNLDSLNAHNAIHRRVEASRTRAPAEEGAEGPSDTKQFFLQCLNLRPSAAGDSCPGTQAGRRVAELDPVNSYQAWQLATRGKVAEPAEYLKYGAWDEALAGDVAFDKDRREYVLVSQEKRKREQDAPAAQGPPRKRASGPGDPAPAGHLDPRSAARPNRRAAATTGQGKSSECFECGKIFRTYHQMVLHSRVHRRARRERDSDGDRAARARCGSLSEGDSASQPSSPGSACAAADSPGSGLADEAAEDSGEEGAPEPAPGGQPRRCCFSEEVTSTELSSGDQSHKMGDNASERDTGESKAGIAASVSILENSSRETSRRQEQHRFSMDLKMPAFHPKQEVPVPGDGVEFPSSTGAEGQTGHPAEKLSDLHNKEHSGGGKRALAPDLMPLDLSARSTRDDPSNKETASSLQAALVVHPCPYCSHKTYYPEVLWMHKRIWHRVSCNSVAPPWIQPNGYKSIRSNLVFLSRSGRTGPPPALGGKECQPLLLARFTRTQVPGGMPGSKSGSSPLGVVTKAASMPKNKESHSGGPCALWAPGPDGYRQTKPCHGQEPHGAATQGPLAKPRQEASSKPVPAPGGGGFSRSATPTPTVIARAGAQPSANSKPVEKFGVPPAGAGFAPTNKHSAPDSLKAKFSAQPQGPPPAKGEGGAPPLPPREPPSKAAQELRTLATCAAGSRGDAALQAQPGVAGAPPRPTLHQTGAGGRGA

SEQ ID NO: 1684 - protein, 266 aa, Homo sapiens
MLLLTRSPTAWHRLSQLKPRVLPGTLGGQALHLRSWLLSRQGPAETGGQGQPQGPGLRTRLLITGLFGAGLGGAWLALRAEKERLQQQKRTEALRQAAVGQGDFHLLDHRGRARCKADFRGQWVLMYFGFTHCPDICPDELEKLVQVVRQLEAEPGLPPVQPVFITVDPERDDVEAMARYVQDFHPRLLGLTGSTKQVAQASHSYRVYYNAGPKDEDQDYIVDHSIAIYLLNPDGLFTDYYGRSRSAEQISDSVRRHMAAFRSVLS

SEQ ID NO: 1685 - protein, 841 aa, Homo sapiens
MPLAAYCYLRVVGKGSYGEVTLVKHRRDGKQYVIKKLNLRNASSRERRAAEQEAQLLSQLKHPNIVTYKESWEGGDGLLYIVMGFCEGGDLYRKLKEQKGQLLPENQVVEWFVQIAMALQYLHEKHILHRDLKTQNVFLTRTNIIKVGDLGIARVLENHCDMASTLIGTPYYMSPELFSNKPYNYKSDVWALGCCVYEMATLKHAFNAKDMNSLVYRIIEGKLPPMPRDYSPELAELIRTMLSKRPEERPSVRSILRQPYIKRQISFFLEATKIKTSKNNIKNGDSQSKPFATVVSGEAESNHEVIHPQPLSSEGSQTYIMGEGKCLSQEKPRASGLLKSPASLKAHTCKQDLSNTTELATISSVNIDILPAKGRDSVSDGFVQENQPRYLDASNELGGICSISQVEEEMLQDNTKSSAQPENLIPMWSSDIVTGEKNEPVKPLQPLIKEQKPKDQSLALSPKLECSGTILAHSNLRLLGSSDSPASASRVAGITGVCHHAQDQVAGECIIEKQGRIHPDLQPHNSGSEPSLSRQRRQKRREQTEHRGEKRQVRRDLFAFQESPPRFLPSHPIVGKVDVTSTQKEAENQRRVVTGSVSSSRSSEMSSSKDRPLSARERRRLKQSQEEMSSSGPSVRKASLSVAGPGKPQEEDQPLPARRLSSDCSVTQERKQIHCLSEDELSSSTSSTDKSDGDYGEGKGQTNEINALVQLMTQTLKLDSKESCEDVPVANPVSEFKLHRKYRDTLILHGKVAEEAEEIHFKELPSAIMPGSEKIRRLVEVLRTDVIRGLGVQLLEQVYDLLEEEDEFDREVRLREHMGEKYTTYSVKARQLKFFEENMNF

SEQ ID NO: 1686 - protein, 968 aa, Homo sapiens
MDSTLTASEIRQRFIDFFKRNEHTYVHSSATIPLDDPTLLFANAGMNQFKPIFLNTIDPSHPMAKLSRAANTQKCIRAGGKHNDLDDVGKDVYHHTFFEMLGSWSFGDYFKELACKMALELLTQEFGIPIERLYVTYFGGDEAAGLEADLECKQIWQNLGLDDTKILPGNMKDNFWEMGDTGPCGPCSEIHYDRIGGRDAAHLVNQDDPNVLEIWNLVFIQYNREADGILKPLPKKSIDTGMGLERLVSVLQNKMSNYDTDLFVPYFEAIQKGTGARPYTGKVGAEDADGIDMAYRVLADHARTITVALADGGRPDNTGRGYVLRRILRRAVRYAHEKLNASRGFFATLVDVVVQSLGDAFPELKKDPDMVKDIINEEEVQFLKTLSRGRRILDRKIQSLGDSKTIPGDTAWLLYDTYGFPVDLTGLIAEEKGLVVDMDGFEEERKLAQLKSQGKGAGGEDLIMLDIYAIEELRARGLEVTDDSPKYNYHLDSSGSYVFENTVATVMALRREKMFVEEVSTGQECGVVLDKTCFYAEQGGQIYDEGYLVKVDDSSEDKTEFTVKNAQVRGGYVLHIGTIYGDLKVGDQVWLFIDEPRRRPIMSNHTATHILNFALRSVLGEADQKGSLVAPDRLRFDFTAKGAMSTQQIKKAEEIANEMIEAAKAVYTQDCPLAAAKAIQGLRAVFDETYPDPVRVVSIGVPVSELLDDPSGPAGSLTSVEFCGGTHLRNSSHAGAFVIVTEEAIAKGIRRIVAVTGAEAQKALRKAESLKKCLSVMEAKVKAQTAPNKDVQREIADLGEALATAVIPQWQKDELRETLKSLKKVMDDLDRASKADVQKRVLEKTKQFIDSNPNQPLVILEMESGASAKALNEALKLFKMHSPQTSAMLFTVDNEAGKITCLCQVPQNAANRGLKASEWVQQVSGLMDGKGGGKDVSAQATGKNVGCLQEALQLATSFAQLRLGDVKN

SEQ ID NO: 1687 - protein, 2725 aa, Homo sapiens
MEQTDCKPYQPLPKVKHEMDLAYTSSSDESEDGRKPRQSYNSRETLHEYNQELRMNYNSQSRKRKEVEKSTQEMEFCETSHTLCSGYQTDMHSVSRHGYQLEMGSDVDTETEGAASPDHALRMWIRGMKSEHSSCLSSRANSALSLTDTDHERKSDGENGFKFSPVCCDMEAQAGSTQDVQSSPHNQFTFRPLPPPPPPPHACTCARKPPPAADSLQRRSMTTRSQPSPAAPAPPTSTQDSVHLHNSWVLNSNIPLETRHFLFKHGSGSSAIFSAASQNYPLTSNTVYSPPPRPLPRSTFSRPAFTFNKPYRCCNWKCTALSATAITVTLALLLAYVIAVHLFGLTWQLQPVEGELYANGVSKGNRGTESMDTTYSPIGGKVSDKSEKKVFQKGRAIDTGEVDIGAQVMQTIPPGLFWRFQITIHHPIYLKFNISLAKDSLLGIYGRRNIPPTHTQFDFVKLMDGKQLVKQDSKGSDDTQHSPRNLILTSLQETGFIEYMDQGPWYLAFYNDGKKMEQVFVLTTAIEIMDDCSTNCNGNGECISGHCHCFPGFLGPDCARDSCPVLCGGNGEYEKGHCVCRHGWKGPECDVPEEQCIDPTCFGHGTCIMGVCICVPGYKGEICEEEDCLDPMCSNHGICVKGECHCSTGWGGVNCETPLPVCQEQCSGHGTFLLDAGVCSCDPKWTGSDCSTELCTMECGSHGVCSRGICQCEEGWVGPTCEERSCHSHCTEHGQCKDGKCECSPGWEGDHCTIAHYLDAVRDGCPGLCFGNGRCTLDQNGWHCVCQVGWSGTGCNVVMEMLCGDNLDNDGDGLTDCVDPDCCQQSNCYISPLCQGSPDPLDLIQQSQTLFSQHTSRLFYDRIKFLIGKDSTHVIPPEVSFDSRRACVIRGQVVAIDGTPLVGVNVSFLHHSDYGFTISRQDGSFDLVAIGGISVILIFDRSPFLPEKRTLWLPWNQFIVVEKVTMQRVVSDPPSCDISNFISPNPIVLPSPLTSFGGSCPERGTIVPELQVVQEEIPIPSSFVRLSYLSSRTPGYKTLLRILLTHSTIPVGMIKVHLTVAVEGRLTQKWFPAAINLVYTFAWNKTDIYGQKVWGLAEALVSVGYEYETCPDFILWEQRTVVLQGFEMDASNLGGWSLNKHHILNPQSGIIHKGNGENMFISQQPPVISTIMGNGHQRSVACTNCNGPAHNNKLFAPVALASGPDGSVYVGDFNFVRRIFPSGNSVSILELSTSPAHKYYLAMDPVSESLYLSDTNTRKVYKLKSLVETKDLSKNFEVVAGTGDQCLPFDQSHCGDGGRASEASLNSPRGITVDRHGFIYFVDGTMIRKIDENAVITTVIGSNGLTSTQPLSCDSGMDITQVRLEWPTDLAVNPMDNSLYVLDNNIVLQISENRRVRIIAGRPIHCQVPGIDHFLVSKVAIHSTLESARAISVSHSGLLFIAETDERKVNRIQQVTTNGEIYIIAGAPTDCDCKIDPNCDCFSGDGGYAKDAKMKAPSSLAVSPDGTLYVADLGNVRIRTISRNQAHLNDMNIYEIASPADQELYQFTVNGTHLHTLNLITRDYVYNFTYNSEGDLGAITSSNGNSVHIRRDAGGMPLWLVVPGGQVYWLTISSNGVLKRVSAQGYNLALMTYPGNTGLLATKSNENGWTTVYEYDPEGHLTNATFPTGEVSSFHSDLEKLTKVELDTSNRENVLMSTNLTATSTIYILKQENTQSTYRVNPDGSLRVTFASGMEIGLSSEPHILAGAVNPTLGKCNISLPGEHNANLIEWRQRKEQNKGNVSAFERRLRAHNRNLLSIDFDHITRTGKIYDDHRKFTLRILYDQTGRPILWSPVSRYNEVNITYSPSGLVTFIQRGTWNEKMEYDQSGKIISRTWADGKIWSYTYLEKSVMLLLHSQRRYIFEYDQPDCLLSVTMPSMVRHSLQTMLSVGYYRNIYTPPDSSTSFIQDYSRDGRLLQTLHLGTGRRVLYKYTKQARLSEVLYDTTQVTLTYEESSGVIKTIHLMHDGFICTIRYRQTGPLIGRQIFRFSEEGLVNARFDYSYNNFRVTSMQAVINETPLPIDLYRYVDVSGRTEQFGKFSVINYDLNQVITTTVMKHTKIFSANGQVIEVQYEILKAIAYWMTIQYDNVGRMVICDIRVGVDANITRYFYEYDADGQLQTVSVNDKTQWRYSYDLNGNINLLSHGKSARLTPLRYDLRDRITRLGEIQYKMDEDGFLRQRGNDIFEYNSNGLLQKAYNKASGWTVQYYYDGLGRRVASKSSLGQHLQFFYADLTNPIRVTHLYNHTSSEITSLYYDLQGHLIAMELSSGEEYYVACDNTGTPLAVFSSRGQVIKEILYTPYGDIYHDTYPDFQVIIGFHGGLYDFLTKLVHLGQRDYDVVAGRWTTPNHHIWKQLNLLPKPFNLYSFENNYPVGKIQDVAKYTTDIRSWLELFGFQLHNVLPGFPKPELENLELTYELLRLQTKTQEWDPGKTILGIQCELQKQLRNFISLDQLPMTPRYNDGRCLEGGKQPRFAAVPSVFGKGIKFAIKDGIVTADIIGVANEDSRRLAAILNNAHYLENLHFTIEGRDTHYFIKLGSLEEDLVLIGNTGGRRILENGVNVTVSQMTSVLNGRTRRFADIQLQHGALCFNIRYGTTVEEEKNHVLEIARQRAVAQAWTKEQRRLQEGEEGIRAWTEGEKQQLLSTGRVQGYDGYFVLSVEQYLELSDSANNIHFMRQSEIGRR

SEQ ID NO: 1688 - protein, 1001 aa, Homo sapiens
MATRTRQEYLKDLAEKNVTNTPIDPSGKFPFISLASKKKEKSKPYPGAELSSMGAIVWAVRAEDYNKAMELDCLLGISNEFIVLIEQETKSVVFNCSCRDVIGWTSTDTSLKIFYERGECVSVGSFINIEEIKEIVKRLQFVSKGCESVEMTLRRNGLGQLGFHVNYEGIVADVEPYGYAWQAGLRQGSRLVEICKVAVATLSHEQMIDLLRTSVTVKVVIIPPHDDCTPRRSCSETYRMPVMEYKMNEGVSYEFKFPFRNNNKWQRNASKGPHSPQVPSQVQSPMTSRLNAGKGDGKMPPPERAANIPRSISSDGRPLERRLSPGSDIYVTVSSMALARSQCRNSPSNLSSSSDTGSVGGTYRQKSMPEGFGVSRRSPASIDRQNTQSDIGGSGKSTPSWQRSEDSIADQMAYSYRGPQDFNSFVLEQHEYTEPTCHLPAVSKVLPAFRESPSGRLMRQDPVVHLSPNKQGHSDSHYSSHSSSNTLSSNASSAHSDEKWYDGDRTESELNSYNYLQGTSADSGIDTTSYGPSHGSTASLGAATSSPRSGPGKEKVAPLWHSSSEVISMADRTLETESHGLDRKTESSLSLDIHSKSQAGSTPLTRENSTFSINDAASHTSTMSSRHSASPVVFTSARSSPKEELHPAAPSQLAPSFSSSSSSSSGPRSFYPRQGATSKYLIGWKKPEGTINSVGFMDTRKRHQSDGNEIAHTRLRASTRDLRASPKPTSKSTIEEDLKKLIDLESPTPESQKSFKFHALSSPQSPFPSTPTSRRALHRTLSDESIYNSQREHFFTSRASLLDQALPNDVLFSSTYPSLPKSLPLRRPSYTLGMKSLHGEFSASDSSLTDIQETRRQPMPDPGLMPLPDTAADLDWSNLVDAAKAYEVQRASFFAASDENHRPLSAASNSDQLEDQALAQMKPYSSSKDSSPTLASKVDQLEGMLKMLREDLKKEKEDKAHLQAEVQHLREDNLRLQEESQNASDKLKKFTEWVFNTIDMS

SEQ ID NO: 1689 - protein, 1871 aa, Homo sapiens
MPSVCLLLLLFLAVGGALGNRPFRAFVVTDTTLTHLAVHRVTGEVFVGAVNRVFKLAPNLTELRAHVTGPVEDNARCYPPPSMRVCAHRLAPVDNINKLLLIDYAARRLVACGSIWQGICQFLRLDDLFKLGEPHHRKEHYLSGAQEPDSMAGVIVEQGQGPSKLFVGTAVDGKSEYFPTLSSRKLISDEDSADMFSLVYQDEFVSSQIKIPSDTLSLYPAFDIYYIYGFVSASFVYFLTLQLDTQQTLLDTAGEKFFTSKIVRMCAGDSEFYSYVEFPIGCSWRGVEYRLVQSAHLAKPGLLLAQALGVPADEDVLFTIFSQGQKNRASPPRQTILCLFTLSNINAHIRRRIQSCYRGEGTLALPWLLNKELPCINTPMQINGNFCGLVLNQPLGGLHVIEGLPLLADSTDGMASVAAYTYRQHSVVFIGTRSGSLKKVRVDGFQDAHLYETVPVVDGSPILRDLLFSPDHRHIYLLSEKQVSQLPVETCEQYQSCAACLGSGDPHCGWCVLRHRCCREGACLGASAPHGFAEELSKCVQVRVRPNNVSVTSPGVQLTVTLHNVPDLSAGVSCAFEAAAENEAVLLPSGELLCPSPSLQELRALTRGHGATRTVRLQLLSKETGVRFAGADFVFYNCSVLQSCMSCVGSPYPCHWCKYRHTCTSRPHECSFQEGRVHSPEGCPEILPSGDLLIPVGVMQPLTLRAKNLPQPQSGQKNYECVVRVQGRQQRVPAVRFNSSSVQCQNASYSYEGDEHGDTELDFSVVWDGDFPIDKPPSFRALLYKCWAQRPSCGLCLKADPRFNCGWCISEHRCQLRTHCPAPKTNWMHLSQKGTRCSHPRITQIHPLVGPKEGGTRVTIVGDNLGLLSREVGLRVAGVRCNSIPAEYISAERIVCEMEESLVPSPPPGPVELCVGDCSADFRTQSEQVYSFVTPTFDQVSPSRGPASGGTRLTISGSSLDAGSRVTVTVRDSECQFVRRDAKAIVCISPLSTLGPSQAPITLAIDRANISSPGLIYTYTQDPTVTRLEPTWSIINGSTAITVSGTHLLTVQEPRVRAKYRGIETTNTCQVINDTAMLCKAPGIFLGRPQPRAQGEHPDEFGFLLDHVQTARSLNRSSFTYYPDPSFEPLGPSGVLDVKPGSHVVLKGKNLIPAAAGSSRLNYTVLIGGQPCSLTVSDTQLLCDSPSQTGRQPVMVLVGGLEFWLGTLHISAERALTLPAMMGLAAGGGLLLLAITAVLVAYKRKTQDADRTLKRLQLQMDNLESRVALECKEAFAELQTDINELTNHMDEVQIPFLDYRTYAVRVLFPGIEAHPVLKELDTPPNVEKALRLFGQLLHSRAFVLTFIHTLEAQSSFSMRDRGTVASLTMVALQSRLDYATGLLKQLLADLIEKNLESKNHPKLLLRRTESVAEKMLTNWFTFLLHKFLKECAGEPLFLLYCAIKQQMEKGPIDAITGEARYSLSEDKLIRQQIDYKTLTLHCVCPENEGSAQVPVKVLNCDSITQAKDKLLDTVYKGIPYSQRPKAEDMDLEWRQGRMTRIILQDEDVTTKIECDWKRLNSLAHYQVTDGSLVALVPKQVSAYNMANSFTFTRSLSRYESLLRTASSPDSLRSRAPMITPDQETGTKLWHLVKNHDHADHREGDRGSKMVSEIYLTRLLATKGTLQKFVDDLFETVFSTAHRGSALPLAIKYMFDFLDEQADQRQISDPDVRHTWKSNCLPLRFWVNVIKNPQFVFDIHKNSITDACLSVVAQTFMDSCSTSEHRLGKDSPSNKLLYAKDIPNYKSWVERYYRDIAKMASISDQDMDAYLVEQSRLHASDFSVLSALNELYFYVTKYRQEILTALDRDASCRKHKLRQKLEQIISLVSSDS

SEQ ID NO: 1690 - protein, 248 aa, Homo sapiens
MRMDWNLQAQAQPTQTTKVTGSLETKYRWTEYGLTFTEKWNTDNTLGTKITVEDQLARGLKLTFDSSFSPNTGKKNAKIKTGYKREHINLGCDMVFDIVGPSIRGALVLGYEGWLAGYQMNFETTKSRVTQSNFAIGYKTDEFQLHTNVNDGTEFGGSIYQKVNKKLETTVNLAWTAGNSNTRFGIAAKYQIDPDACFSAKVNNSSLIGLGYTQTLKPGIKLTLSALLDGKNVNAGGHKLGLGLEFQA

SEQ ID NO: 1691 - protein, 129 aa, Homo sapiens
MNFETAKSRVTQSNFAVGYETDEFWLHTNVNDGTEFGSLIYQKVNKKLETAVNLAWTAGNSNTRFGIAAKYQIDPDACFSAKVNNSSLIGLGYTQTLKPGIKLTLSALLDGKNVNAGGHKLGLGLEFQA

SEQ ID NO: 1692 - protein, 111 aa, Homo sapiens
MAGKQAISASGKWLDGIRKWYYNTAGFNKLGLMRDDTIYEDEDIKEAIRRLPENLYNDRMCHIKSALDLTMKHQILPKEQWTKYEEENFYLELYVQEVIRERKEREEWAKK

SEQ ID NO: 1693 - protein, 639 aa, Homo sapiens
MSARGPAIGIDLGTTYSCVGVFQHGKVEIIANDQGNRTTPSYVAFTDTERLIGDAAKNQVAMNPTNTIFDAKRLIGRKFEDATVQSDMKHWPFRVVSEGGKPKVQVEYKGETKTFFPEEISSMVLTKMKEIAEAYLGGKVHSAVITVPAYFNDSQRQATKDAGTITGLNVLRIINEPTAAAIAYGLDKKGCAGGEKNVLIFDLGGGTFDVSILTIEDGIFEVKSTAGDTHLGGEDFDNRMVSHLAEEFKRKHKKDIGPNKRAVRRLRTACERAKRTLSSSTQASIEIDSLYEGVDFYTSITRARFEELNADLFRGTLEPVEKALRDAKLDKGQIQEIVLVGGSTRIPKIQKLLQDFFNGKELNKSINPDEAVAYGAAVQAAILIGDKSENVQDLLLLDVTPLSLGIETAGGVMTPLIKRNTTIPTKQTQTFTTYSDNQSSVLVQVYEGERAMTKDNNLLGKFDLTGIPPAPRGVPQIEVTFDIDANGILNVTAADKSTGKENKITITNDKGRLSKDDIDRMVQEAERYKSEDEANRDRVAAKNALESYTYNIKQTVEDEKLRGKISEQDKNKILDKCQEVINWLDRNQMAEKDEYEHKQKELERVCNPIISKLYQGGPGGGSGGGGSGASGGPTIEEVD

SEQ ID NO: 1694 - protein, 558 aa, Homo sapiens
MYRYLAKALLPSRAGPAALGSAANHSAALLGRGRGQPAAASQPGLALAARRHYSELVADREDDPNFFKMVEGFFDRGASIVEDKLVKDLRTQESEEQKRNRVRGILRIIKPCNHVLSLSFPIRRDDGSWEVIEGYRAQHSQHRTPCKGGIRYSTDVSVDEVKALASLMTYKCAVVDVPFGGAKAGVKINPKNYTENELEKITRRFTMELAKKGFIGPGVDVPAPDMNTGEREMSWIADTYASTIGHYDINAHACVTGKPISQGGIHGRISATGRGVFHGIENFINEASYMSILGMTPGFRDKTFVVQGFGNVGLHSMRYLHRFGAKCIAVGESDGSIWNPDGIDPKELEDFKLQHGSILGFPKAKPYEGSILEVDCDILIPAATEKQLTKSNAPRVKAKIIAEGANGPTTPEADKIFLERNILVIPDLYLNAGGVTVSYFEWLKNLNHVSYGRLTFKYERDSNYHLLLSVQESLERKFGKHGGTIPIVPTAEFQDSISGASEKDIVHSALAYTMERSARQIMHTAMKYNLGLDLRTAAYVNAIEKVFKVYSEAGVTFT

SEQ ID NO: 1695 - protein, 347 aa, Homo sapiens
MPRGQKSKLRAREKRRKAREETQGLKVAHATAAEKEECPSSSPVLGDTPTSSPAAGIPQKPQGAPPTTTAAAAVSCTESDEGAKCQGEENASFSQATTSTESSVKDPVAWEAGMLMHFILRKYKMREPIMKADMLKVVDEKYKDHFTEILNGASRRLELVFGLDLKEDNPSGHTYTLVSKLNLTNDGNLSNDWDFPRNGLLMPLLGVIFLKGNSATEEEIWKFMNVLGAYDGEEHLIYGEPRKFITQDLVQEKYLKYEQVPNSDPPRYQFLWGPRAYAETTKMKVLEFLAKMNGATPRDFPSHYEEALRDEEERAQVRSSVRARRRTTATTFRARSRAPFSRSSHPM

SEQ ID NO: 1696 - protein, 1893 aa, Homo sapiens
MGSQRVAACRLLAESLLERGHSAGPMVRQRQQDLQTAWSELWELTQARGHALRDTETTLRVHRDLLEVLTQVQEKATSLPNNVARDLCGLEAQLRSHQGLERELVGTERQLQELLETAGRVQKLCPGPQAHAVQQRQQAVTQAWAVLQRRMEQRRAQLERARLLARFRTAVRDYASWAARVRQDLQVEESSQEPSSGPLKLSAHQWLRAELEAREKLWQQATQLGQQALLAAGTPTKEVQEELRALQDQRDQVYQTWARKQERLQAEQQEQLFLRECGRLEEILAAQEVSLKTSALGSSVEEVEQLIRKHEVFLKVLTAQDKKEAALRERLKTLRRPRVRDRLPILLQRRMRVKELAESRGHALHASLLMASFTQAATQAEDWIQAWAQQLKEPVPPGDLRDKLKPLLKHQAFEAEVQAHEEVMTSVAKKGEALLAQSHPRAGEVSQRLQGLRKHWEDLRQAMALRGQELEDRRNFLEFLQRVDLAEAWIQEKEVKMNVGDLGQDLEHCLQLRRRLREFRGNSAGDTVGDACIRSISDLSLQLKNRDPEEVKIICQRRSQLNNRWASFHGNLLRYQQQLEGALEIHVLSRELDNVTKRIQEKEALIQALDCGKDLESVQRLLRKHEELEREVHPIQAQVESLEREVGRLCQRSPEAAHGLRHRQQEVAESWWQLRSRAQKRREALDALHQAQKLQAMLQELLVSAQRLRAQMDTSPAPRSPVEARRMLEEHQECKAELDSWTDSISLARSTGQQLLTAGHPFSSDIRQVLAGLEQELSSLEGAWQEHQLQLQQALELQLFLSSVEKMERWLCSKEDSLASEGLWDPLAPMEPLLWKHKMLEWDLEVQAGKISALEATARGLHQGGHPEAQSALGRCQAMLLRKEALFRQAGTRRHRLEELRQLQAFLQDSQEVAAWLREKNLVALEEGLLDTAMLPAQLQKQQNFQAELDASMHQQQELQREGQRLLQGGHPASEAIQERLEELGALWGELQDNSQKKVAKLQKACEALRLRRSMEELENWLEPIEVELRAPTVGQALPGVGELLGTQRELEAAVDKKARQAEALLGQAQAFVREGHCLAQDVEEQARRLLQRFKSLREPLQERRTALEARSLLLKFFRDADEEMAWVQEKLPLAAAQDYGQSLSAVRHLQEQHQNLESEMSSHEALTRVVLGTGYKLVQAGHFAAHEVAARVQQLEKAMAHLRAEAARRRLLLQQAQEAQQFLTELLEAGSWLAERGHVLDSEDMGHSAEATQALLRRLEATKRDLEAFSPRIERLQQTAALLESRKNPESPKVLAQLQAVREAHAELLRRAEARGHGLQEQLQLHQLERETLLLDAWLTTKAATAESQDYGQDLEGVKVLEEKFDAFRKEVQSLGQAKVYALRKLAGTLERGAPRRYPHIQAQRSRIEAAWERLDQAIKARTENLAAAHEVHSFQQAAAELQGRMQEKTALMKGEDGGHSLSSVRTLQQQHRRLERELEAMEKEVARLQTEACRLGQLHPAAPGGLAKVQEAWATLQAKAQERGQWLAQAAQGHAFLGRCQELLAWAQERQELASSEELAEDVAGAEQLLGQHEELGQEIRECRLQAQDLRQEGQQLVDNSHFMSAEVTECLQELEGRLQELEEAWALRWQRCAESWGLQKLRQRLEQAEAWLACWEGLLLKPDYGHSVSDVELLLHRHQDLEKLLAAQEEKFAQMQKTEMEQELLLQPQELKPGRAGSSLTSFQWRPSGHQGLGAQLAETRDPQDAKGTPTMEGSLEFKQHLLPGGRQPSSSSWDSCRGNLQGSSLSLFLDERMAAEKVASIALLDLTGARCERLRGRHGRKHTFSLRLTSGAEILFAAPSEEQAESWWRALGSTAAQSLSPKLKAKPVSSLNECTTKDARPGCLLRSDP

SEQ ID NO: 1697 - protein, 112 aa, Homo sapiens
MDGEEKTYGGCEGPDATYVKLISSDGHEFIVKREHALTSGTIKAMLSGPGQFAENETNEVNFREIPSHVLSKVCMYFTYKVRYTNSSIEIPEFPIAPEIVLELLMAANFLDC

SEQ ID NO: 1698 - protein, 206 aa, Homo sapiens
MPPWRETLASRVSPRWPLGEGGVLARAAVAQRPREVSLSATDCYIVHEIYNGENAQDQFEYELEQALEAQYKYIVIEPTRIGDETARWITVGNCLHKTAVLAGTACLFTPLALPLDYSHYISLPAGVLSLACCTLYGISWQFDPCCKYQVEYDAYKLSRLPLHTLTSSTPVVLVRKDDLHRKRLHNTIALAALVYCVKKIYELYAV

SEQ ID NO: 1699 - protein, 136 aa, Homo sapiens
MPRPPRGYPACRSRAAAPGWRWGRAEAAEVLRATGGWQWAGERGRQARLGLGLWRRGTLCLGSLTAPPGSPERGTGGEGGGSWAPCAAGPRGARVAAGSAGPDRVNGRAWPVPRGAPAATALAAGTGVLRGRSLPF

SEQ ID NO: 1700 - protein, 1167 aa, Homo sapiens
MGSDILSTQKAAVETSFLDYGENLVQKWQVLSEVLSCSEKLVCHLGRLGSVSEAKAFCLEALKLTTKLQIPRQCALFLVLKGELELARNDIDLCQSDLQQVLFLLESCTEFGGVTQHLDSVKKVHLQKGKQQAQVPCPPQLPEEELFLRGPALELVATVAKEPGPIAPSTNSSPVLKTKPQPIPNFLSHSPTCDCSLCASPVLTAVCLRWVLVTAGVRLAMGHQAQGLDLLQVVLKGCPEAAERLTQALQASLNHKTPPSLVPSLLDEILAQAYTLLALEGLNQPSNESLQKVLQSGLKFVAARIPHLEPWRASLLLIWALTKLGGLSCCTTQLFASSWGWQPPLIKSVPGSEPSKTQGQKRSGRGRQKLASAPLRLNNTSQKGLEGRGLPCTPKPPDRIRQAGPHVPFTVFEEVCPTESKPEVPQAPRVQQRVQTRLKVNFSDDSDLEDPVSAEAWLAEEPKRRGTASRGRGRARKGLSLKTDAVVAPGSAPGNPGLNGRSRRAKKVASRHCEERRPQRASDQARPGPEIMRTIPEEELTDNWRKMSFEILRGSDGEDSASGGKTPAPGPEAASGEWELLRLDSSKKKLPSPCPDKESDKDLGPRLRLPSAPVATGLSTLDSICDSLSVAFRGISHCPPSGLYAHLCRFLALCLGHRDPYATAFLVTESVSITCRHQLLTHLHRQLSKAQKHRGSLEIADQLQGLSLQEMPGDVPLARIQRLFSFRALESGHFPQPEKESFQERLALIPSGVTVCVLALATLQPGTVGNTLLLTRLEKDSPPVSVQIPTGQNKLHLRSVLNEFDAIQKAQKENSSCTDKREWWTGRLALDHRMEVLIASLEKSVLGCWKGLLLPSSEEPGPAQEASRLQELLQDCGWKYPDRTLLKIMLSGAGALTPQDIQALAYGLCPTQPERAQELLNEAVGRLQGLTVPSNSHLVLVLDKDLQKLPWESMPSLQALPVTRLPSFRFLLSYSIIKEYGASPVLSQGVDPRSTFYVLNPHNNLSSTEEQFRANFSSEAGWRGVVGEVPRPEQVQEALTKHDLYIYAGHGAGARFLDGQAVLRLSCRAVALLFGCSSAALAVRGNLEGAGIVLKYIMAGCPLFLGNLWDVTDRDIDRYTEALLQGWLGAGPGAPLLYYVNQARQAPRLKYLIGAAPIAYGLPVSLR

SEQ ID NO: 1701 - protein, 448 aa, Homo sapiens
MIPTFTALLCLGLSLGPRTHMQAGPLPKPTLWAEPGSVISWGNSVTIWCQGTLEAREYRLDKEESPAPWDRQNPLEPKNKARFSIPSMTEDYAGRYRCYYRSPVGWSQPSDPLELVMTGAYSKPTLSALPSPLVTSGKSVTLLCQSRSPMDTFLLIKERAAHPLLHLRSEHGAQQHQAEFPMSPVTSVHGGTYRCFSSHGFSHYLLSHPSDPLELIVSGSLEDPRPSPTRSVSTAAGPEDQPLMPTGSVPHSGLRRHWEVLIGVLVVSILLLSLLLFLLLQHWRQGKHRTLAQRQADFQRPPGAAEPEPKDGGLQRRSSPAADVQGENFCAAVKNTQPEDGVEMDTRQSPHDEDPQAVTYAKVKHSRPRREMASPPSPLSGEFLDTKDRQAEEDRQMDTEAAASEAPQDVTYAQLHSFTLRQKATEPPPSQEGASPAEPSVYATLAIH

SEQ ID NO: 1702 - protein, 409 aa, Homo sapiens
MSGRSVRLRSVPIQSLSELERARLQEVAFYQLQQDCDLSCQITIPKDGQKRKKSLRKKLDSLGKEKNKDKEFIPQAFGMPLSQVIANDRAYKLKQDLQRDEQKDASDFVASLLPFGNKRQNKELSSSNSSLSSTSETPNESTSPNTPEPAPRARRRGAMSVDSITDLDDNQSRLLEALQLSLPAEAQSKKEKARDKKLSLNPIYRQVPRLVDSCCQHLEKHGLQTVGIFRVGSSKKRVRQLREEFDRGIDVSLEEEHSVHDVAALLKEFLRDMPDPLLTRELYTAFINTLLLEPEEQLGTLQLLIYLLPPCNCDTLHRLLQFLSIVARHADDNISKDGQEVTGNKMTSLNLATIFGPNLLHKQKSSDKEFSVQSSARAEESTAIIAVVQKMIENYEALFMFPQISRTKC

SEQ ID NO: 1703 - protein, 1189 aa, Homo sapiens
MDRNPNNDQVFPNGTLAPSIPIWGGSWRAPGWDPLCWDECRGSCPTCPEDRLEQYEGPGFCGPLSSGTGGPFTTCHAHVPPESFFKGCVLDVCMGGGDRDILCKALASYVAACQAAGVVIEDWRAQVGCEITCPENSHYEVCGPPCPASCPSPAPLTTPAVCEGPCVEGCQCDAGFVLSADRCVPLNNGCGCWANGTYHEAGSEFWADGTCSQWCRCGPGGGSLVCTPASCGLGEVCGLLPSGQHGCQPVSTAECQAWGDPHYVTLDGHRFDFQGTCEYLLSAPCHGPPLGAENFTVTVANEHRGSQAVSYTRSVTLQIYNHSLTLSARWPRKLQVDGVFVALPFQLDSLLHAHLSGADVVVTTTSGLSLAFDGDSFVRLRVPAAYAASLCGLCGNYNQDPADDLKAVGGKPAGWQVGGAQGCGECVSKPCPSPCTPEQQESFGGPDACGVISAISATDGPLAPCHGLVPPAQYFQGCLLDACQVQGHPGGLCPAVATYVAACQAAGAQLGEWRRPDFCPLQCPAHSHYELCGDSCPVSCPSLSAPEGCESACREGCVCDAGFVLSGDTCVPVGQCGCLHDGRYYPLGEVFYPGPECERRCECGPGGHVTCQEGAACGPHEECRLEDGVQACHATGCGRCLANGGIHYITLDGRVYDLHGSCSYVLAQVCHPKPGDEDFSIVLEKNAAGDLQRLLVTVAGQVVSLAQGQQVTVDGEAVALPVAVGRVRVTAEGRNMVLQTTKGLRLLFDGDAHLLMSIPSPFRGRLCGLCGNFNGNWSDDFVLPNGSAASSVETFGAAWRAPGSSKGCGEGCGPQGCPVCLAEETAPYESNEACGQLRNPQGPFATCQAVLSPSEYFRQCVYDLCAQKGDKAFLCRSLAAYTAACQAAGVAVKPWRTDSFCPLHCPAHSHYSICTRTCQGSCAALSGLTGCTTRCFEGCECDDRFLLSQGVCIPVQDCGCTHNGRYLPVNSSLLTSDCSERCSCSSSSGLTCQAAGCPPGRVCEVKAEARNCWATRGLCVLSVGANLTTFDGARGATTSPGVYELSSRCPGLQNTIPWYRVVAEVQICHGKTEAVGQVHIFFQDGMVTLTPNKGVWVNGLRVDLPAEKLASVSVSRTPDGSLLVRQKAGVQVWLGANGKVAVIVSNDHAGKLCGACGNFDGDQTNDWHDSQEKPAMEKWRAQDFSPCYG

SEQ ID NO: 1704 - protein, 846 aa, Homo sapiens
MKKFTQVLEDDEKIRKQLEVLVSPTCSCKQAEGCVREITKKLGNPKQPTNPFLEMIKFLLERIAPVHIDTESISALIKQVNKSIDGTADDEDEGVPTDQAIRAGLELLKVLSFTHPISFHSAETFESLLACLKMDDEKVAEAALQIFKNTGSKIEEDFPHIRSALLPVLHHKSKKGPPRQAKYAIHCIHAIFSSKETQFAQIFEPLHKSLDPSNLEHLITPLVTIGHIALLAPDQFAAPLKSLVATFIVKDLLMNDRLPGKKTTKLWVPDEEVSPETMVKIQAIKMMVRWLLGMKNNHSKSGTSTLRLLTTILHSDGDLTEQGKISKPDMSRLRLAAGSAIVKLAQEPCYHEIITLEQYQLCALAINDECYQVRQVFAQKLHKGLSRLRLPLEYMAICALCAKDPVKERRAHARQCLVKNINVRREYLKQHAAVSEKLLSLLPEYVVPYTIHLLAHDPDYVKVQDIEQLKDVKECLWFVLEILMAKNENNSHAFIRKMVENIKQTKDAQGPDDAKMNEKLYTVCDVAMNIIMSKSTTYSLESPKDPVLPARFFTQPDKNFSNTKNYLPPEMKSFFTPGKPKTTNVLGAVNKPLSSAGKQSQTKSSRMETVSNASSSSNPSSPGRIKGRLDSSEMDHSENEDYTMSSPLPGKKSDKRDDSDLVRSELEKPRGRKKTPVTEQEEKLGMDDLTKLVQEQKPKGSQRSRKRGHTASESDEQQWPEEKRLKEDILENEDEQNSPPKKGKRGRPPKPLGGGTPKEEPTMKTSKKGSKKKSGPPAPEEEEEEERQSGNTEQKSKSKQHRVSRRAQQRAESPESSAIESTQSTPQKGRGRPSKTPSPSQPKKNV

SEQ ID NO: 1705 - protein, 693 aa, Homo sapiens
MWPQPYLPPHPMMLEESRQNKLAAAKKKLKEYQQRKSPGIPAGAKTKKKKTDSSPETTTSGGGHSPGDSQYQELAVALESSSVTINQLNENIESLKQQKKQVEHQLEEAKKTNNEIHKAQMEQLETINILTLEKADLKTTLYHTKRAARHFEEESKDLAGRLQYSLQHIQELERALCAVSTQQQEEDRSSSCREAVLQRRLQQTIKERALLNAHVTQVTESLKQVQLERDEYAKHIKGERARWQERMWKMSVEARTLKEEKKRDIHRIQELERSLSELKNQMAEPPSLAPPAVTSVVEQLQDEAKHLRQEVEGLEGKLQSQVENNQALSLLSKEQKQRLQEQEEMLREQEAQRVREQERLCEQNERLREQQKTLQEQGERLRKQEQRLRKQEERLRKEEERLQKQEKRLWDQEERLWKKEERLQKQEERLALSQNHKLDKQLAEPQCSFEDLNNEKKSALQLEQQVKELQEKLDEEHLEAASQRNQQLETQLSLVALPGEGDGGQHLDSEEEEAPRPTPNIPEDLESREATSSFMDLPKEKADGTEQVERRELGFVQPSGVTDGMRESFTVYESQGAVPNTRHQEMEDVIRLAQKEEEMKVKLLELQELVLPLVGNHEGHGKFLIAAQNPADEPTPGAPAPQELGAAGEQDVFYEVSLDNNVEPAPGVAREGSPHNNPTVQQIVQLSPVMQDT

SEQ ID NO: 1706 - protein, 935 aa, Homo sapiens
MSVEAYGPSSQTLTFLDTEEAELLGADTQGSEFEFTDFTLPSQTQTPPGGPGGPGGGGAGGPGGAGAGAAAGQLDAQVGPEGILQNGAVDDSVAKTSQLLAELNFEEDEEDTYYTKDLPIHACSYCGIHDPACVVYCNTSKKWFCNGRGNTSGSHIVNHLVRAKCKEVTLHKDGPLGETVLECYNCGCRNVFLLGFIPAKADSVVVLLCRQPCASQSSLKDINWDSSQWQPLIQDRCFLSWLVKIPSEQEQLRARQITAQQINKLEELWKENPSATLEDLEKPGVDEEPQHVLLRYEDAYQYQNIFGPLVKLEADYDKKLKESQTQDNITVRWDLGLNKKRIAYFTLPKTDSDMRLMQGDEICLRYKGDLAPLWKGIGHVIKVPDNYGDEIAIELRSSVGAPVEVTHNFQVDFVWKSTSFDRMQSALKTFAVDETSVSGYIYHKLLGHEVEDVIIKCQLPKRFTAQGLPDLNHSQVYAVKTVLQRPLSLIQGPPGTGKTVTSATIVYHLARQGNGPVLVCAPSNIAVDQLTEKIHQTGLKVVRLCAKSREAIDSPVSFLALHNQIRNMDSMPELQKLQQLKDETGELSSADEKRYRALKRTAERELLMNADVICCTCVGAGDPRLAKMQFRSILIDESTQATEPECMVPVVLGAKQLILVGDHCQLGPVVMCKKAAKAGLSQSLFERLVVLGIRPIRLQVQYRMHPALSAFPSNIFYEGSLQNGVTAADRVKKGFDFQWPQPDKPMFFYVTQGQEEIASSGTSYLNRTEAANVEKITTKLLKAGAKPDQIGIITPYEGQRSYLVQYMQFSGSLHTKLYQEVEIASVDAFQGREKDFIILSCVRANEHQGIGFLNDPRRLNVALTRARYGVIIVGNPKALSKQPLWNHLLNYYKEQKVLVEGPLNNLRESLMQFSKPRKLVNTINPGSPLHDHSHV

SEQ ID NO: 1707 - protein, 82 aa, Homo sapiens [sequence omitted]

SEQ ID NO: 1708 - protein, 183 aa, Homo sapiens [sequence omitted]

SEQ ID NO: 1709 - protein, 125 aa, Homo sapiens
MGNIFEKLFKSLLGKKKMRILILSLDTAGKTTILYKLKLGETVPAVPTVGFCVETVEYKNNTFAVWDVGSHFKIRPLWQHFFQNTKELSASQFAQFIKKLCGVTGTNDEASPGSLTSYPSHLLDR

SEQ ID NO: 1710 - protein, 216 aa, Homo sapiens
MAGRGGAARPNGPAAGNKICQFKLVLLGESAVGKSSLVLRFVKGQFHEYQESTIGAAFLTQTVCLDDTTVKFEIWDTAGQERYHSLAPMYYRGAQAAIVVYDITNTDTFARAKNWVKELQRQASPNIVIALAGNKADLASKRAVEFQEAQAYADDNSLLFMETSAKTAMNVNEIFMAIAKKLPKNEPQNATGAPGRNRGVDLQENNPASRSQCCSN

SEQ ID NO: 1711 - protein, 592 aa, Homo sapiens
MMHPGQPPSSCEKTTVISCVWTSRTSTVSSRMWRQRPCGWKNMAKWCWCWREPLRAPALPDPQPQAGTGYTVMSGTPEKILELLLEAMGPDSSAHDPTETFLSDFLLTHRVFMPSAQLCAALLHHFHVEPAGGSEQERSTYVCNKRQQILRLVSQWVALYGSMLHTDPVATSFLQKLSDLVGRDTRLSNLLREQWPERRRCHRLENGCGNASPQMKARNLPVWLPNQDEPLPGSSCAIQVGDKVPYDICRPDHSVLTLQLPVTASVREVMAALAQEDGWTKGQVLVKVNSAGDAIGLQPDARGVATSLGLNERLFVVNPQEVHELIPHPDQLGPTVGSAEGLDLVSAKDLAGQLTDHDWSLFNSIHQVELIHYVLGPQHLRDVTTANLERFMRRFNELQYWVATELCLCPVPGPRAQLLRKFIKLAAHLKEQKNLNSFFAVMFGLSNSAISRLAHTWERLPHKVRKLYSALERLLDPSWNHRVYRLALAKLSPPVIPFMPLLLKDMTFIHEGNHTLVENLINFEKMRMMARAARMLHHCRSHNPVPLSPLRSRVSHLHEDSQVARISTWLGAVPEHPESSQHLGLCPAAEGH

SEQ ID NO: 1712 - protein, 373 aa, Homo sapiens [sequence omitted]

SEQ ID NO: 1713 - protein, 667 aa, Homo sapiens [sequence omitted]

SEQ ID NO: 1714 - protein, 224 aa, Homo sapiens
MGIMAASRPLSRFWEWGKNIVCVGRNYADHVREMRSAVLSEPVLFLKPSTAYAPEGSPILMPAYTRNLHHELELGVVMGKRCRAVPEAAAMDYVGGYALCLDMTARDVQDECKKKGLPWTLAKSFTASCPVSAFVPKEKIPDPHKLKLWLKVNGELRQEGETSSMIFSIPYIISYVSKIITLEEGDIILTGTPKGVGPVKENDEIEAGIHGLVSMTFKVEKPEY

SEQ ID NO: 1715 - protein, 109 aa, Homo sapiens
MAASAARGAAALRRSINQPVAFVRRIPWTAASSQLKEHFAQFGHVRRCILPFDKETGFHRGLGWVQFSSEEGLRNALQQENHIIDGVKVQVHTRRPKLPQTSDDEKKDF

SEQ ID NO: 1716 - protein, 251 aa, Homo sapiens
MAHRLQIRLLTWDVKDTLLRLRHPLGEAYATKARAHGLEVEPSALEQGFRQAYRAQSHSFPNYGLSHGLTSRQWWLDVVLQTFHLAGVQDAQAVAPIAEQLYKDFSHPCTWQVLDGAEDTLRECRTRGLRLAVISNFDRRLEGILGGLGLREHFDFVLTSEAAGWPKPDPRIFQEALRLAHMEPVVAAHVGDNYLCDYQGPRAVGMHSFLVVGPQALDPVVRDSVPKEHILPSLAHLLPALDCLEGSTPGL

SEQ ID NO: 1717 - protein, 127 aa, Homo sapiens [sequence omitted]

SEQ ID NO: 1718 - protein, 1388 aa, Homo sapiens
MTPLNKTKTALGFLLWIVCWADLFYSFWERSRGIFLAPVFLVSPTLLGITMLLATFLIQLERRKGVQSSGIMLTFWLVALVCALAILRSKIMTALKENPCPESSASFLSRITFWWITGLIVRGYRQPLEGSDLWSLNKEDTSEQVVPVLVKNWKKECAKTRKQPVKVVYSSKDPAQPKESSKVDANEEVEALIVKSPQKEWNPSLFKVLYKTFGPYFLMSFFFKAIHDLMMFSGPQILKLLIKFVNDTKAPDWQGYFYTVLLFVTACLQTLVLHQYFHICFVSGMRIKTAVIGAVYRKALVITNSARKSSTVGEIVNLMSVDAQRFMDLATYINMIWSAPLQVILALYLLWLNLGPSVLAGVAVMVLMVPVNAVMAMKTKTYQVAHMKSKDNRIKLMNEILNGIKVLKLYAWELAFKDKVLAIRQEELKVLKKSAYLSAVGTFTWVCTPFLVALCTFAVYVTIDENNILDAQTAFVSLALFNILRFPLNILPMVISSIVQASVSLKRLRIFLSHEELEPDSIERRPVKDGGGTNSITVRNATFTWARSDPPTLNGITFSIPEGALVAVVGQVGCGKSSLLSALLAEMDKVEGHVAIKGSVAYVPQQAWIQNDSLRENILFGCQLEEPYYRSVIQACALLPDLEILPSGDRTEIGEKGVNLSGGQKQRVSLARAVYSNADIYLFDDPLSAVDAHVGKHIFENVIGPKGMLKNKTRILVTHSMSYLPQVDVIIVMSGGKISEMGSYQELLARDGAFAEFLRTYASTEQEQDAEENGVTGVSGPGKEAKQMENGMLVTDSAGKQLQRQLSSSSSYSGDISRHHNSTAELQKAEAKKEETWKLMEADKAQTGQVKLSVYWDYMKAIGLFISFLSIFLFMCNHVSALASNYWLSLWTDDPIVNGTQEHTKVRLSVYGALGISQGIAVFGYSMAVSIGGILASRCLHVDLLHSILRSPMSFFERTPSGNLVNRFSKELDTVDSMIPEVIKMFMGSLFNVIGACIVILLATPIAAIIIPPLGLIYFFVQRFYVASSRQLKRLESVSRSPVYSHFNETLLGVSVIRAFEEQERFIHQSDLKVDENQKAYYPSIVANRWLAVRLECVGNCIVLFAALFAVISRHSLSAGLVGLSVSYSLQVTTYLNWLVRMSSEMETNIVAVERLKEYSETEKEAPWQIQETAPPSSWPQVGRVEFRNYCLRYREDLDFVLRHINVTINGGEKVGIVGRTGAGKSSLTLGLFRINESAEGEIIIDGINIAKIGLHDLRFKITIIPQDPVLFSGSLRMNLDPFSQYSDEEVWTSLELAHLKDFVSALPDKLDHECAEGGENLSVGQRQLVCLARALLRKTKILVLDEATAAVDLETDDLIQSTIRTQFEDCTVLTIAHRLNTIMDYTR

SEQ ID NO: 1719 - protein, 135 aa, Homo sapiens
MSASADVLALAKIEIKLSDIPEGKNMAFKWRGKPLFVRHRTQKEIKQEAAVELSQLRDPQHDLDRVKKPEWVILIGVCTHLGCVPIANAGDFGGYYCPCHGSHYDASGRIRLGPATLNLEVPTYEFTSDDMVIVG

SEQ ID NO: 1720 - protein, 543 aa, Homo sapiens
MFSWLKRGGARGQQPEAIRTVTSALKELYRTKLLPLEEHYRFGAFHSPALEDADFDGKPMVLVAGQYSTGKTSFIQYLLEQEVPGSRVGPEPTTDCFVAVMHGDTEGTVPGNALVVDPDKPFRKLNPFGNTFLNRFMCAQLPNQVLESISIIDTPGILSGAKQRVSRGYDFPAVLRWFAERVDLIILLFDAHKLEISDEFSEAIGALRGHEDKIRVVLNKADMVETQQLMRVYGALMWALGKVVGTPEVLRVYIGSFWSQPLLVPDNRRLFELEEQDLFRDIQGLPRHAALRKLNDLVKRARLVRVHAYIISYLKKEMPSVFGKENKKKQLILKLPVIFAKIQLEHHISPGDFPDCQKMQELLMAHDFTKFHSLKPKLLEALDEMLTHDIAKLMPLLRQEELESTEVGVQGGAFEGTHMGPFVERGPDEAMEDGEEGSDDEAEWVVTKDKSKYDEIFYNLAPADGKLSGSKAKTWMVGTKLPNSVLGRIWKLSDVDRDGMLDDEEFALASHLIEAKLEGHGLPANLPRRLVPPSKRRHKGSAE

SEQ ID NO: 1721 - protein, 50 aa, Homo sapiens
MRADQPATPGLPLSPHLDAGAVAAPQPRSLAAATRPQASGAGGGPRSPWG

SEQ ID NO: 1722 - protein, 463 aa, Homo sapiens [sequence omitted]

SEQ ID NO: 1723 - protein, 639 aa, Homo sapiens; identical to SEQ ID NO: 1693

SEQ ID NO: 1724 - protein, 1437 aa, Homo sapiens
MDFSFSFMQGIMGNTIQQPPQLIDSANIRQEDAFDNNSDIAEDGGQTPYEATLQQGFQYPATTEDLPPLTNGYPSSISVYETQTKYQSYNQYPNGSANGFGAVRNFSPTDYYHSEIPNTRPHEILEKPSPPQPPPPPSVPQTVIPKKTGSPEIKLKITKTIQNGRELFESSLCGDLLNEVQASEHTKSKHESRKEKRKKSNKHDSSRSEERKSHKIPKLEPEEQNRPNERVDTVSEKPREEPVLKEEAPVQPILSSVPTTEVSTGVKFQVGDLVWSKVGTYPWWPCMVSSDPQLEVHTKINTRGAREYHVQFFSNQPERAWVHEKRVREYKGHKQYEELLAEATKQASNHSEKQKIRKPRPQRERAQWDIGIAHAEKALKMTREERIEQYTFIYIDKQPEEALSQAKKSVASKTEVKKTRRPRSVLNTQPEQTNAGEVASSLSSTEIRRHSQRRHTSAEEEEPPPVKIAWKTAAARKSLPASITMHKGSLDLQKCNMSPVVKIEQVFALQNATGDGKFIDQFVYSTKGIGNKTEISVRGQDRLIISTPNQRNEKPTQSVSSPEATSGSTGSVEKKQQRRSIRTRSESEKSTEVVPKKKIKKEQVETVPQATVKTGLQKGASEISDSCKPLKKRSRASTDVEMTSSAYRDTSDSDSRGLSDLQVGFGKQVDSPSATADADVSDVQSMDSSLSRRGTGMSKKDTVCQICESSGDSLIPCEGECCKHFHLECLGLASLPDSKFICMECKTGQHPCFSCKVSGKDVKRCSVGACGKFYHEACVRKFPTAIFESKGFRCPQHCCSACSMEKDIHKASKGRMMRCLRCPVAYHSGDACIAAGSMLVSSYILICSNHSKRSSNSSAVNVGFCFVCARGLIVQDHSDPMFSSYAYKSHYLLNESNRAELMKLPMIPSSSASKKKCEKGGRLLCCESCPASFHPECLSIEMPEGCWNCNDCKAGKKLHYKQIVWVKLGNYRWWPAEICNPRSVPLNIQGLKHDLGDFPVFFFGSHDYYWVHQGRVFPYVEGDKSFAEGQTSINKTFKKALEEAAKRFQELKAQRESKEALEIEKNSRKPPPYKHIKANKVIGKVQIQVADLSEIPRCNCKPADENPCGLESECLNRMLQYECHPQVCPAGDRCQNQCFTKRLYPDAEIIKTERRGWGLRTKRSIKKGEFVNEYVGELIDEEECRLRIKRAHENSVTNFYMLTVTKDRIIDAGPKGNYSRFMNHSCNPNCETQKWTVNGDVRVGLFALCDIPAGMELTFNYNLDCLGNGRTECHCGADNCSGFLGVRPKSACASTNEEKAKNAKLKQKRRKIKTEPKQMHEDYCFQCGDGGELVMCDKKDCPKAYHLLCLNLTQPPYGKWECPWHQCDECSSAAVSFCEFCPHSFCKDHEKGALVPSALEGRLCCSEHDPMAPVSPEYWSKIKCKWESQDHGEEVKE

SEQ ID NO: 1725 - protein, 697 aa, Homo sapiens
MGERAGSPGTDQERKAGKHHYSYLSDFETPQSSGRSSLVSSSPASVRRKNPKRQTSDGQVHHQAPRKPSPKGLPNRKGVRVGFRSQSLNREPLRKDTDLVTKRILSARLLKINELQNEVSELQVKLAELLKENKSLKRLQYRQEKALNKFEDAENEISQLIFRHNNEITALKERLRKSQEKERATEKRVKDTESELFRTKFSLQKLKEISEARHLPERDDLAKKLVSAELKLDDTERRIKELSKNLELSTNSFQRQLLAERKRAYEAHDENKVLQKEVQRLYHKLKEKERELDIKNIYSNRLPKSSPNKEKELALRKNAACQSDFADLCTKGVQTMEDFKPEEYPLTPETIMCYENKWEEPGHLTLDLQSQKQDRHGEAGILNPIMEREEKFVTDEELHVVKQEVEKLEDEWEREELDKKQKEKASLLEREEKPEWETGRYQLGMYPIQNMDKLQGEEEERLKREMLLAKLNEIDRELQDSRNLKYPVLPLLPDFESKLHSPERSPKTYRFSESSERLFNGHHLQDISFSTPKGEGQNSGNVRSPASPNEFAFGSYVPSFAKTSERSNPFSQKSSFLDFQRNSMEKLSKDGVDLITRKEKKANLMEQLFGASGSSTISSKSSDPNSVASSKGDIDPLNFLPGNKGSRDQEHDEDEGFFLSEGRSFNPNRHRLKHADDKPAVKAADSVEDEIEEVALR

SEQ ID NO: 1726 - protein, 565 aa, Homo sapiens
GKNVDNNKRISTGKKMSQTSLKQKKNEPGMRSSKESLEAEKRKESDKTGVRLSNQGSQESSLRKTDSRGYLVRSQWSRISRSPSTKAPSIDEPRSRNTSAKLPSSSTSSRTPSTSPSLHDSSPPPLSGQPSLQPPASPQLPRSLDSRPPTPPEPDPGSRRSTKMQENPEAWAQGIVREIRQTRDSQPLEYSRTSPTEWKSSSQRRGIYPASTQLDRNSLSEQQQQQREDEDDYEAAYWASMKSFYEKNPSCWRPWPPKPKNAITIALSSCALFNMVDGRKIYEQEGLEKYMEYQLTNENVILTPGPAFRFVKALQYVNARLRDLYPDEQDLFDIVLMTNNHAQVGVRLINSVNHYGLLIDRFCLTGGKDPIGYLKAYLTNLYIAADSEKVQEAIQEGIASATMFDGAKDMAYCDTQLRVAFDGDAVLFSDESEHFTKEHGLDKFFQYDTLCESKPLAQGPLKGFLEDLGRLQKKFYAKNERLLCPIRTYLVTARSAASSGARVLKTFRRWGLEIDEALFLAGAPKSPILVKIRPHIFFDDHMFHIEGAQRLGSIAAYGFNKKFSS

SEQ ID NO: 1727 - protein, 614 aa, Homo sapiens
MGGSSPVTSKAIVDADGRIYIRNWQGGILSGGFEKNPKPIFTEGKNQLEIQNLQEDWDHFEPLLSSLLRRMPELETLEIMKLVNCPETFTPDMRCIMGESPAVQGYFVLAGMNSAGLSFGGGAGKYLAEWMVHGYPSENVWELDLKRFGALQSSRTFLRHRAIEVMPLMYDLKVPRWDFQTGRQLRTSPLYDRLDAQGARWMEKHGFERPKYFVPPDKDLLALEQSKTFYKPDWFDIVESEVKCCKEAVCVIDMSSFTKFEITSTGDQALEVLQYLFSSDLDVPVGHIVHTGMLNEGGGYENDCSIARLNKRSFFMISPTDQQVHCWAWLKKHMPKDSNLLLEDVTWKYTALNLIGPRAVDVLSELSYAPMTPDHFPSLFCKEMSVGYAKGIRVMSMTHTGEPGFMLYIPIEGMDFIGRDALLQQKQNGVYKRLTMFILDDHDSDLDLWPWWGEPIYRNGQYVGKTTSSAYSYSLERHVCLGFVHNFSEDTGEEQVVTADFINRGEYEIDIAGYRFQAKAKLYPVASLFTQKRRKDDMELSDFLALPPPPPNIHSGLFFPSHPSLSCSWWQEVCLTGQKQAPHHLVLEWASPWSFSSFRLCSSSGAFASHLLSP

SEQ ID NO: 1728 - protein, 151 aa, Homo sapiens
MLQRLQIIGESIMKRDLTSVINVANFSEIVHILQVIGELILERNLTNVMTVPRSSVKLHPMQNIGEFIQERNLTSVMIVAKPLLHVHTSLDIRESILDRNLTNVISVARSSVQDHSMQNIRKFIFEITVPNEMSIANHQALIDIGVNSALT

SEQ ID NO: 1729 - protein, 653 aa, Homo sapiens
MAAEASKTGPSRSSYQRMGRKSQPWGAAEIQCTRCGRRVSRSSGHHCELQCGHAFCELCLLMTEECTTIICPDCEVATAVNTRQRYYPMAGYIKEDSIMEKLQPKTIKNCSQDFKKTADQLTTGLERSASTDKTLLNSSAVMLDTNTAEEIDEALNTAHHSFEQLSIAGKALEHMQKQTIEERERVIEVVEKQFDQLLAFFDSRKKNLCEEFARTTDDYLSNLIKAKSYIEEKKNNLNAAMNIARALQLSPSLRTYCDLNQIIRTLQLTSDSELAQVSSPQLRNPPRLSVNCSEIICMFNNMGKIEFRDSTKCYPQENEIRQNVQKKYNNKKELSCYDTYPPLEKKKVDMSVLTSEAPPPSLQPETNDVHLEAKNFQPQKDVATASPKTIAVLPQMGSSPDVIIEEIIEDNVESSAELVFVSHVIDPCHFYIRKYSQIKDAKVLEKKVNEFCNRSSHLDPSDILELGARIFVSSIKNGMWCRGTITELIPIEGRNTRKPCSPTRLFVHEVALIQIFMVDFGNSEVLIVTGVVDTHVRPEHSAKQHIALNDLCLVLRKSEPYTEGLLKDIQPLAQPCSLKDIVPQNSNEGWEEEAKVEFLKMVNNKAVSMKVFREEDGVLIVDLQKPPPNKISSDMPVSLRDALVFMELAKDLI

SEQ ID NO: 1730 - protein, 315 aa, Homo sapiens
MHREPAKKKAEKRLFDASSFGKDLLAGGVAAAVSKTAVAPIERVKLLLQVQASSKQISPEARYKGMVDCLVRIPREQGFFSFWRGNLANVIRYFPTQALNFAFKDKYKQLFMSGVNKEKQFWRWFLANLASGGAAGATSLCVVYPLDFARTRLGVDIGKGPEERQFKGLGDCIMKIAKSDGIAGLYQGFGVSVQGIIVYRASYFGAYDTVKGLLPKPKKTPFLVSFFIAQVVTTCSGILSYPFDTVRRRMMMQSGEAKRQYKGTLDCFVKIYQHEGISSFFRGAFSNVLRGTGGALVLVLYDKIKEFFHIDIGGR

SEQ ID NO: 1731 - protein, 701 aa, Homo sapiens
MEEDTDYRIRFSSLCFFNDHVGFHGTIKSSPSDFIVIEIDEQGQLVNKTIDEPIFKISEIQLEPNNFPKKPKLDLQNLSLEDGRNQEVHTLIKYTDGDQNHQSGSEKEDTIVDGTSKCEEKADVLSSFLDEKTHELLNNFACDVREKWLSKTELIGLPPEFSIGRILDKNQRASLHSAIRQKFPFLVTVGKNSEIVVKPNLEYKELCHLVSEEEAFDFFKYLDAKKENSKFTFKPDTNKDHRKAVHHFVNKKFGNLVETKSFSKMNCSAGNPNVVVTVRFREKAHKRGKRPLSECQEGKVIYTAFTLRKENLEMFEAIGFLAIKLGVIPSDFSYAGLKDKKAITYQAMVVRKVTPERLKNIEKEIEKKRMNVFNIRSVDDSLRLGQLKGNHFDIVIRNLKKQINDSANLRERIMEAIENVKKKGFVNYYGPQRFGKGRKVHTDQIGLALLKNEMMKAIKLFLTPEDLDDPVNRAKKYFLQTEDAKGTLSLMPEFKVRERALLEALHRFGMTEEGCIQAWFSLPHSMRIFYVHAYTSKIWNEAVSYRLETYGARVVQGDLVCLDEDIDDENFPNSKIHLVTEEEGSANMYAIHQVVLPVLGYNIQYPKNKVGQWYHDILSRDGLQTCRFKVPTLKLNIPGCYRQILKHPCNLSYQLMEDHDIDVKTKGSHIDETALSLLISFDLDASCYATVCLKEIMKHDV

SEQ ID NO: 1732 - protein, 132 aa, Homo sapiens
MRAINIADELPRSRARKLADEQLSSVIQDMAVRQHLLTNLVEVDGRFVWRVNLDALTQHLDKILAFPQRQESYLGPTLFLLGGNSQFVHPSHHPEIMRLFPRAQMQTVPNAGHWIHADRPQDFIAAIRGFLV

SEQ ID NO: 1733 - protein, 580 aa, Homo sapiens
MFVPRSLKIKRNANDDGKSCVAKIIKPDPEDLQLDKSRDVPVDAVATEAATIDRHISESCPFPSPGGQLAEVHSVSPEQGAKDSHPSEEPVKSFSKTQRWAEPGEPICVVCGRYGEYICDKTDEDVCSLECKAKHLLQVKEKEEKSKLSNPQKADSEPESPLNASYVYKEHPFILNLQEDQIENLKQQLGILVQGQEVTRPIIDFEHCSLPEVLNHNLKKSGYEVPTPIQMQMIPVGLLGRDILASADTGSGKTAAFLLPVIMRALFESKTPSALILTPTRELAIQIERQAKELMSGLPRMKTVLLVGGLPLPPQLYRLQQHVKVIIATPGRLLDIIKQSSVELCGVKIVVVDEADTMLKMGFQQQVLDILENIPNDCQTILVSATIPTSIEQLASQLLHNPVRIITGEKNLPCANVRQIILWVEDPAKKKKLFEILNDKKLFKPPVLVFVDCKLGADLLSEAVQKITGLKSISIHSEKSQIERKNILKGLLEGDYEVVVSTGVLGRGLDLISVRLVVNFDMPSSMDEYVHQENTYKSTWRNPQHFQQDVRMTLGYVGKAQWEEDNQLKVKLGLKKNCSS

SEQ ID NO: 1734 - protein, 526 aa, Homo sapiens
PVEEEDVGSSEKLGRETEEQDSDSAEQGDPAGEGKEVLCDFCLDDTRRVKAVKSCLTCMVNYCEEHLQPHQVNIKLQSHLLTEPVKDHNWRYCPAHHSPLSAFCCPDQQCICQDCCQEHSGHTIVSLDAARRDKEAELQCTQLDLERKLKLNENAISRLQANQKSVLVSVSEVKAVAEMQFGELLAAVRKAQANVMLFLEEKEQAALSQANGIKAHLEYRSAEMEKSKQELERMAAISNTVQFLEEYCKFKNTEDITFPSVYVGLKDKLSGIRKVITESTVHLIQLLENYKKKLQEFSKEEEYDIRTQVSAVVQRKYWTSKPEPSTREQFLQYAYDITFDPDTAHKYLRLQEENRKVTNTTPWEHPYPDLPSRFLHWRQVLSQQSLYLHRYYFEVEIFGAGTYVGLTCKGIDRKGEERNSCISGNNLSWSLQWNGKEFTAWYSDMETPLKAGPFRRLGVYIDFPGGILSFYGVEYDTMTLVHKFACKFSEPVYAAFWLSKKENAIRIVDLGEEPEKPAPSLVGTAP

SEQ ID NO: 1735 - protein, 229 aa, Homo sapiens
MAEEMESSLEASFSSSGAVSGASGFLPPARSRIFKIIVIGDSNVGKTCLTYRFCAGRFPDRTEATIGVDFRERAVEIDGERIKIQLWDTAGQERFRKSMVQHYYRNVHAVVFVYDMTNMASFHSLPSWIEECKQHLLANDIPRILVGNKCDLRSAIQVPTDLAQKFADTHSMPLFETSAKNPNDNDHVEAIFMTLAHKLKSHKPLMLSQPPDNGIILKPEPKPAMTCWC

SEQ ID NO: 1736 - protein, 333 aa, Homo sapiens
ATLKEKLIAPVAEEEATVPNNKITVVGVGQVGMACAISILGKSLADELALVDVLEDKLKGEMMDLQHGSLFLQTPKIVADKDYSVTANSKIVVVTAGVRQQEGESRLNLVQRNVNVFKFIIPQIVKYSPDCIIIVVSNPVDILTYVTWKLSGLPKHRVIGSGCNLDSARFRYLMAEKLGIHPSSCHGWILGEHGDSSVAVWSGVNVAGVSLQELNPEMGTDNDSENWKEVHKMVVESAYEVIKLKGYTNWAIGLSVADLIESMLKNLSRIHPVSTMVKGMYGIENEVFLSLPCILNARGLTSVINQKLKDDEVAQLKKSADTLWDIQKDLKDL

SEQ ID NO: 1737 - protein, 906 aa, Homo sapiens
MANETQKVGAIHFPFPFTPYSIQEDFMAELYRVLEAGKIGIFESPTGTGKSLSLICGALSWLRDFEQKKREEEARLLETGTGPLHDEKDESLCLSSSCEGAAGTPRPAGEPAWVTQFVQKKEERDLVDRLKAEQARRKQREERLQQLQHRVQLKYAAKRLRQEEEERENLLRLSREMLETGPEAERLEQLESGEEELVLAEYESDEEKKVASRVDEDEDDLEEEHITKIYYCSRTHSQLAQFVHEVKKSPFGKDVRLVSLGSRQNLCVNEDVKSLGSVQLINDRCVDMQRSRHEKKKGAEEEKPKRRRQEKQAACPFYNHEQMGLLRDEALAEVKDMEQLLALGKEARACPYYGSRLAIPAAQLVVLPYQMLLHAATRQAAGIRLQDQVVIIDEAHNLIDTITGMHSVEVSGSQLCQAHSQLLQYVERYGKRLKAKNLMYLKQILYLLEKFVAVLGGNIKQNPNTQSLSQTGTELKTINDFLFQSQIDNINLFKVQRYCEKSMISRKLFGFTERYGAVFSSREQPKLAGFQQFLQSLQPRTTEALAAPADESQASTLRPASPLMHIEGFLAALTTANQDGRVILSRQGSLSQSTLKFLLLNPAVHFAQVVKECRAVVIAGGTMQPVSDFRQQLLACAGVEAERVVEFSCGHVIPPDNILPLVICSGISNQPLEFTFQKRELPQMMDEVGRILCNLCGVVPGGVVCFFPSYEYLRQVHAHWEKGGLLGRLAARKKIFQEPKSAHQVEQVLLAYSRCIQACGQERGQVTGALLLSVVGGKMSEGINFSDNLGRCVVMVGMPFPNIRSAELQEKMAYLDQTLPRAPGQAPPGKALVENLCMKAVNQSIGRAIRHQKDFASIVLLDQRYARPPVLAKLPAWIRARVEVKATFGPAIAAVQKFHREKSASS

SEQ ID NO: 1738 - protein, 299 aa, Homo sapiens
MRPLQIVPSRLISQLYCGLKPPASTRNQICLKMARPSSSMADFRKFFAKAKHIVIISGAGVSAESGVPTFRGAGGYWRKWQAQDLATPLAFAHNPSRVWEFYHYRREVMGSKEPNAGHRAIAECETRLGKQGRRVVVITQNIDELHRKAGTKNLLEIHGSLFKTRCTSCGVVAENYKSPICPALSGKGAPEPGTQDASIPVEKLPRCEEAGCGGLLRPHVVWFGENLDPAILEEVDRELAHCDLCLVVGTSSVVYPAAMFAPQVAARGVPVAEFNTETTPATNRFSHLISISSLIIIKN

SEQ ID NO: 1739 - protein, 4349 aa, Homo sapiens
MTIALLGFAIFLLHCATCEKPLEGILSSSAWHFTHSHYNATIYENSSPKTYVESFEKMGIYLAEPQWAVRYRIISGDVANVFKTEEYVVGNFCFLRIRTKSSNTALLNREVRDSYTLIIQATEKTLELEALTRVVVHILDQNDLKPLFSPPSYRVTISEDMPLKSPICKVTATDADLGQNAEFYYAFNTRSEMFAIHPTSGVVTVAGKLNVTWRGKHELQVLAVDRMRKISEGNGFGSLAALVVHVEPALRKPPAIASVVVTPPDSNDGTTYATVLVDANSSGAEVESVEVVGGDPGKHFKAIKSYARSNEFSLVSVKDINWMEYLHGFNLSLQARSGSGPYFYSQIRGFHLPPSKLSSLKFEKAVYRVQLSEFSPPGSRVVMVRVTPAFPNLQYVLKPSSENVGFKLNARTGLITTTKLMDFHDRAHYQLHIRTSPGQASTVVVIDIVDCNNHAPLFNRSSYDGTLDENIPPGTSVLAVTATDRDHGENGYVTYSIAGPKALPFSIDPYLGIISTSKPMDYELMKRIYTFRVRASDWGSPFRREKEVSIFLQLRNLNDNQPMFEEVNCTGSIRQDWPVGKSIMTMSAIDVDELQNLKYEIVSGNELEYFDLNHFSGVISLKRPFINLTAGQPTSYSLKITASDGKNYASPTTLNITVVKDPHFEVPVTCDKTGVLTQFTKTILHFIGLQNQESSDEEFTSLSTYQINHYTPQFEDHFPQSIDVLESVPINTPLARLAATDPDAGFNGKLVYVIADGNEEGCFDIELETGLLTVAAPLDYEATNFYILNVTVYDLGTPQKSSWKLLTVNVKDWNDNAPRFPPGGYQLTISEDTEVGTTIAELTTKDADSEDNGRVRYTLLSPTEKFSLHPLTGELVVTGHLDRESEPRYILKVEARDQPSKGHQLFSVTDLIITLEDVNDNSPQCITEHNRLKVPEDLPPGTVLTFLDASDPDLGPAGEVRYVLMDGAHGTFRVDLMTGALILERELDFERRAGYNLSLWASDGGRPLARRTLCHVEVIVLDVNENLHPPHFASFVHQGQVQENSPSGTQVIVVAAQDDDSGLDGELQYFLRAGTGLAAFSINQDTGMIQTLAPLDREFASYYWLTVLAVDRGSVPLSSVTEVYIEVTDANDNPPQMSQAVFYPSIQEDAPVGTSVLQLDAWDPDSSSKGKLTFNITSGNYMGFFMIHPVTGLLSTAQQLDRENKDEHILEVTVLDNGEPSLKSTSRVVVGILDVNDNPPIFSHKLFNVRLPERLSPVSPGPVYRLVASDLDEGLNGRVTYSIEDSDEEAFSIDLVTGVVSSSSTFTAGEYNILTIKATDSGQPPLSASVRLHIEWIPWPRPSSIPLAFDETYYSFTVMETDPVNHMVGVISVEGRPGLFWFNISGGDKDMDFDIEKTTGSIVIARPLDTRRRSNYNLTVEVTDGSRTIATQVHIFMIANINHHRPQFLETRYEVRVPQDTVPGVELLRVQAIDQDKGKSLIYTIHGSQDPGSASLFQLDPSSGVLVTVGKLDLGSGPSQHTLTVMVRDQEIPIKRNFVWVTIHVEDGNLHPPRFTQLHYEASVPDTIAPGTELLQVRAMDADRGVNAEVHYSLLKGNSEGFFNINALLGIITLAQKLDQANHAPHTLTVKAEDQGSPQWHDLATVIIHVYPSDRSAPIFSKSEYFVEIPESIPVGSPILLVSAMSPSEVTYELREGNKDGVFSMNSYSGLISTQKKLDHEKISSYQLKIRGSNMAGAFTDVMVVVDIIDENDNAPMFLKSTFVGQISEAAPLYSMIMDKNNNPFVIHASDSDKEANSLLVYKILEPEALKFFKIDPSMGTLTIVSEMDYESMPSFQFCVYVHDQGSPVLFAPRPAQVIIHVRDVNDSPPRFSEQIYEVAIVGPIHPGMELLMVRASDEDSEVNYSIKTGNADEAVTIHPVTGSISVLNPAFLGLSRKLTIRASDGLYQDTALVKISLTQVLDKSLQFDQDVYWAAVKENLQDRKALVILGAQGNHLNDTLSYFLLNGTDMFHMVQSAGVLQTRGVAFDREQQDTHELAVEVRDNRTPQRVAQGLVRVSIEDVNDNPPKFKHLPYYTIIQDGTEPGDVLFQVSATDEDLGTNGAVTYEFAEDYTYFRIDPYLGDISLKKPFDYQALNKYHLKVIARDGGTPSLQSEEEVLVTVRNKSNPLFQSPYYKVRVPENITLYTPILHTQARSPEGLRLIYNIVEEEPLMLFTTDFKTGVLTVTGPLDYESKTKHVFTVRATDTALGSFSEATVEVLVEDVNDNPPTFSQLVYTTSISEGLPAQTPVIQLLASDQDSGRNRDVSYQIVEDGSDVSKFFQINGSTGEMSTVQELDYEAQQHFHVKVRAMDKGDPPLTGETLVVVNVSDINDNPPEFRQPQYEANVSELATCGHLVLKVQAIDPDSRDTSRLEYLILSGNQDRHFFINSSSGIISMFNLCKKHLDSSYNLRVGASDGVFRATVPVYINTTNANKYSPEFQQHLYEAELAENAMVGTKVIDLLAIDKDSGPYGTIDYTIINKLASEKFSINPNGQIATLQKLDRENSTERVIAIKVMARDGGGRVAFCTVKIILTDENDNPPQFKASEYTVSIQSNVSKDSPVIQVLAYDADEGQNADVTYSVNPEDLVKDVIEINPVTGVVKVKDSLVGLENQTLDFFIKAQDGGPPHWNSLVPVRLQVVPKKVSLPKFSEPLYTFSAPEDLPEGSEIGIVKAVAAQDPVIYSLVRGTTPESNKDGVFSLDPDTGVIKVRKPMDHESTKLYQIDVMAHCLQNTDVVSLVSVNIQVGDVNDNRPVFEADPYKAVLTENMPVGTSVIQVTAIDKDTGRDGQVSYRLSADPGSNVHELFAIDSESGWITTLQELDCETCQTYHFHVVAYDHGQTIQLSSQALVQVSITDENDNAPRFASEEYRGSVVENSEPGELVATLKTLDADISEQNRQVTCYITEGDPLGQFGISQVGDEWRISSRKTLDREHTAKYLLRVTASDGKFQASVTVEIFVLDVNDNSPQCSQLLYTGKVHEDVFPGHFILKVSATDLDTDTNAQITYSLHGPGAHEFKLDPHTGELTTLTALDRERKDVFNLVAKATDGGGRSCQADITLHVEDVNDNAPRFFPSHCAVAVFDNTTVKTPVAVVFARDPDQGANAQVVYSLPDSAEGHFSIDATTGVIRLEKPLQVRPQAPLELTVRASDLGTPIPLSTLGTVTVSVVGLEDYLPVFLNTEHSVQVPEDAPPGTEVLQLATLTRPGAEKTGYRVVSGNEQGRFRLDARTGILYVNASLDFETSPKYFLSIECSRKSSSSLSDVTTVMVNITDVNEHRPQFPQDPYSTRVLENALVGDVILTVSATDEDGPLNSDITYSLIGGNQLGHFTIHPKKGELQVAKALDREQASSYSLKLRATDSGQPPLHEDTDIAIQVADVNDNPPRFFQLNYSTTVQENSPIGSKVLQLILSDPDSPENGPPYSFRITKGNNGSAFRVTPDGWLVTAEGLSRRAQEWYQLQIQASDSGIPPLSSLTSVRVHVTEQSHYAPSALPLEIFITVGEDEFQGGMVGKIHATDRDPQDTLTYSLAEEETLGRHFSVGAPDGKIIAAQGLPRGHYSFNVTVSDGTFTTTAGVHVYVWHVGQEALQQAMWMGFYQLTPEELVSDHWRNLQRFLSHKLDIKRANIHLASLQPAEAVAGVDVLLVFEGHSGTFYEFQELASIITHSAKEMEHSVGVQMRSAMPMVPCQGPTCQGQICHNTVHLDPKVGPTYSTARLSILTPRHHLQRSCSCNGTATRFSGQSYVRYRAPAARNWHIHFYLKTLQPQAILLFTNETASVSLKLASGVPQLEYHCLGGFYGNLSSQRHVNDHEWHSILVEEMDASIRLMVDSMGNTSLVVPENCRGLRPERHLLLGGLILLHSSSNVSQGFEGCLDAVVVNEEALDLLAPGKTVAGLLETQALTQCCLHSDYCSQNTCLNGGKCSWTHGAGYVCKCPPQFSGKHCEQGRENCTFAPCLEGGTCILSPKGASCNCPHPYTGDRCEMEARGCSEGHCLVTPEIQRGDWGQQELLIITVAVAFIIISTVGLLFYCRRCKSHKPVAMEDPDLLARSVGVDTQAMPAIELNPLSASSCNNLNQPEPSKASVPNELVTFGPNSKQRPVVCSVPPRLPPAAVPSHSDNEPVIKRTWSSEEMVYPGGAMVWPPTYSRNERWEYPHSEVTQGPLPPSAHRHSTPVVMPEPNGLYGGFPFPLEMENKRAPLPPRYSNQNLEDLMPSRPPSPRERLVAPCLNEYTAISYYHSQFRQGGGGPCLADGGYKGVGMRLSRAGPSYAVCEVEGAPLAGQGQPRVPPNYEGSDMVESDYGSCEEVMF

SEQ ID NO: 1740 - protein, 207 aa, Homo sapiens
MTSRKKVLLKVIILGDSGVGKTSLMNQYVNKKFSNQYKATIGADFLTKEVMVDDRLVTMQIWDTAGQERFQSLGVAFYRGADCCVLVFDVTAPNTFKTLDSWRDEFLVQASPRDPENFPFVVLGNKVDLENRQVATKRAQAWCYSKNNIPYFETSAKEAINVEQAFQTIARNALKQETEVELYNEFPEPIKLDKNDRAKASAESCSC

SEQ ID NO: 1741 - protein, 673 aa, Homo sapiens
SLNPLCFECGQQHWTRENHLYNYQNEVDDDLVCHICLQPLLQPLDTPCGHTFCYKCLRNFLQEKDFCPLDRKRLHFKLCKKSSILVHKLLDKLLVLCPFSSVCKDVMQRCDLEAHLKNRCPGASHRRVALERRKTSRTQAEIENENGPTLLDPAGTLSPEADCLGTGAVPVERHLTSASLSTWSEEPGLDNPAFEESAGADTTQQPLSLPEGEITTIEIHRSNPYIQLGISIVGGNETPLINIVIQEVYRDGVIARDGRLLAGDQILQVNNYNISNVSHNYARAVLSQPCNTLHLTVLRERRFGNRAHNHSDSNSPREEIFQVALHKRDSGEQLGIKLVRRTDEPGVFILDLLEGGLAAQDGRLSSNDRVLAINGHDLKYGTPELAAQIIQASGERVNLTIARPGKPQPGNTIREAGNHSSSSQHHTPPPYYSRPSSHKDLTQCVTCQEKHITVKKEPHESLGMTVAGGRGSKSGELPIFVTSVPPHGCLARDGRIKRGDVLLNINGIDLTNLSHSEAVAMLKASAASPAVALKALEVQIVEEATQNAEEQPSTFSENEYDASWSPSWVMWLGLPSTLHSCHDIVLRRSYLGSWGFSIVGGYEENHTNQPFFIKTIVLGTPAYYDGRLKCGDMIVAVNGLSTVGMSHSALVPMLKEQRNKVTLTVICWPGSLV

SEQ ID NO: 1742 - protein, 484 aa, Homo sapiens
MNQVVQPLMSRHSACRGSQAHLSWVDKGDLVALSLPAGHGDTDGPISLDVPDGAPDPQRTKAAIDHLHQKILKITEQIKIEQEARDDNVAEYLKLANNADKQQVSRIKQVFEKKNQKSAQTIAQLHKKLEHYRRRLKEIEQNGPSRQPKDVLRDMQQGLKDVGANVRAGISGFGGGVVEGVKGSLSGLSQATHTAVVSKPREFASLIRNKFGSADNIAHLKDPLEDGPPEEAARALSGSATLVSSPKYGSDDECSSASASSAGAGSNSGAGPGGALGSPKSNALYGAPGNLDALLEELREIKEGQSHLEDSMEDLKTQLQRDYTYMTQCLQEERYRYERLEEQLNDLTELHQNEMTNLKQELASMEEKVAYQSYERARDIQEAVESCLTRVTKLELQQQQQQVVQLEGVENANARALLGKFINVILALMAVLLVFVSTIANFITPLMKTRLRITSTTLLVLVLFLLWKHWDSLTYLLEHVLLPS

SEQ ID NO: 1743 - protein, 5065 aa, Homo sapiens
MAATLGAGTPPRPQARSIAGVYVEASGQAQSVYAAMEQGLLPAGLGQALLEAQAATGGLVDLARGQLLPVSKALQQGLVGLELKEKLLAAERATTGYPDPYGGEKLALFQAIGKEVVDRALGQSWLEVQLATGGLVDPAQGVLVAPEPACHQGLLDRETWHKLSELEPGTGDLRFLNPNTLERLTYHQLLERCVRAPGSGLALLPLKITFRSMGGAVSAAELLEVGILDEQAVQGLREGRLAAVDVSARAEVRRYLEGTGSVAGVVLLPEGHKKSFFQAATEHLLPMGTALPLLEAQAATHTLVDPITGQRLWVDEAVRAGLVSPELHEQLLVAEQAVTGHHDPFSGSQIPLFQAMKKGLVDRPLALRLLDAQLATGGLVCPARRLRLPLEAALRCGCLDEDTQRQLSQAGSFSDGTHGGLRYEQLLALCVTDPETGLAFLPLSGGPRGGEPQGPPFIKYSTRQALSTATATVSVGKFRGRPVSLWELLFSEAISSEQRAMLAQQYQEGTLSVEKLAAELSATLEQAAATARVTFSGLRDTVTPGELLKAEIIDQDLYERLEHGQATAKDVGSLASAQRYLQGTGCIAGLLLPGSQERLSIYEARCKGLLRPGTALILLEAQAATGFIIDPKANKGHSVEEALRAAVIGPDVFAKLLSAERAVTGYTDPYTGQQISLFQAMQKGLIVREHGIRLLEAQIATGGVIDPVHSHRVPVDVAYRRGYFDQMLNLILLDPSDDTKGFFDPNTHENLTYLQLLERCVRDPETGLYLLPLSSTQSPLVDSATQQAFQNLLLSVKYGRFQGQRVSAWELINSEYFSEGRRRQLLRRYRQREVTLGQVAKLLEAETQRQADIMLPALRSRVTVHQLLEAGIIDQQLLDQVLAGTISPEALLLMDGVRRYLCGLGAVGGVRLLPSGQRLSLYQAMRQKLLGPRVALALLEAQAATGTIMDPHSPESLSVDEAVRRGVVGPELYGRLKRAEGAIAGFRDPFSGKQVSVFQAMKKGLIPWEQAARLLEAQVATGGIIDPTSHHHLPMPVAIQRGYVDQEMETALSSSSETFPTPDGQGRTSYAQLLEECPRDETSGLHLLPLPESAPALPTEEQVQRSLQAVPGAKDGTSLWDLLSSCHFTEEQRRGLLEDVQEGRTTVPQLLASVQRWVQETKLLAQARVMVPGPRGEVPAVWLLDAGIITQETLEALAQGTQSPAQVAEQPAVKACLWGTGCVAGVLLQPSGAKASIAQAVRDGLLPTGLGQRLLEAQVASGFLVDPLNNQRLSVEDAVKVGLVGRELSEQLGQAERAAAGYPDPYSRASLSLWQAMEKGLVPQNEGLPLLQVQLATGGVVDPVHGVHLPQAAACRLGLLDTQTSQVLTAVDKDNKFFFDPSARDQVTYQQLRERCVCDSETGLLLLPLPSDTVLEVDDHTAVALRAMKVPVSTGRFKGCSVSLWDLLLSEYVGADKRRELVALCRSGRAAALRQVVSAVTALVEAAERQPLQATFRGLRKQVSARDLFRAQLISRKTLDELSQGTTTVKEVAEMDSVKRSLEGGNFIAGVLIQGTQERMSIPEALRRHILRPGTALVLLEAQAATGFIIDPAENRKLTVEEAFKAGMFGKETYVKLLSAERAVTGYTDPYTGQQISLFQAMQKDLIVREHGIRLLEAQIATGGIIDPVHSHRVPVDVAYRCGYFDEEMNRILADPSDDTKGFFDPNTHENLTYLQLLERCVEDPETGLYLLQIIKKGENYVYINEATRHVLQSRTAKMRVGRFADQVVSFWDLLSSPYFTEDRKRELIQEYGAQSGGLEKLLEIITTTIEETETQNQGIKVAAIRGEVTAADLFNSRVIDQKTLHTLRVGRTGGQALSTLECVKPYLEGSDCIAGVTVPSTREVMSLHEASRKELIPAAFATWLLEAQAATGFLLDPCTRQKLSVDEAVDVGLVNEELRERLLKAERAATGYRDPATGDTIPLFQAMQKQLIEKAEALRLLEVQVATGGVIDPQHHHRLPLETAYRRGCLHKDIYALISDQKHMRKRFVDPNTQEKVSYRELQERCRPQEDTGWVLFPVNKAARDSEHIDDETRRALEAEQVEITVGRFRGQKPTLWALLNSEYVTEEKKLQLVRMYRTHTRRALQTVAQLILELIEKQETSNKHLWFQGIRRQITASELLSSAIITEEMLQDLETGRSTTQELMEDDRVKRYLEGTSCIAGVLVPAKDQPGRQEKMSIYQAMWKGVLRPGTALVLLEAQAATGFVIDPVRNLRLSVEEPVPAGVVGSEIQEKLLSAERAVTGYTDPYTGQQISLFQAMQKDLIVREHGIRLLEAQIATGGVIDPVHSHRVPVDVAYRRGYFDEEMNRVLADPSDDTKGFFDPNTHENLTYVQLLRRCVPDPDTGLYMLQLAGRGSAVHQLSEELRCALRDARVTPGSGALQGQSVSVWELLFYREVSEDRRQDLLSRYRAGTLTVEELGATLTSLLAQAQAQARAEAEAGSPRPDPREALRAATMEVKVGRLRGRAVPVWDVLASGYVSRAAREELLAEFGSGTLDLPALTRRLTAIIEEAEEAPGARPQLQDARRGPREPGPAGRGDGDSGRSQREGQGEGETQEAAAAAAAARRQEQTLRDATMEVQRGQFQGRPVSVWDVLFSSYLSEARRDELLAQHAAGALGLPDLVAVLTRVIEETEERLSKVSFRGLRRQVSASELHTSGILGPETLRDLAQGTKTLQEVTEMDSVKRYLEGTSCIAGVLVPAKDQPGRQEKMSIYQAMWKGVLRPGTALVLLEAQAATGFVIDPVRNLRLSVEEAVAAGVVGGEIQEKLLSAERAVTGYTDPYTGQQISLFQAMQKDLIVREHGIRLLEAQIATGGVIDPVHSHRVPVDVAYRRGYFDEEMNRVLADPSDDTKGFFDPNTHENLTYVQLLRRCVPDPDTGLYMLQLAGRGSAVHQLSEELRCALRDARVTPGSGALQGQSVSVWELLFYREVSEDRRQDLLSRYRAGTLTVEELGATLTSLLAQAQAQARAEAEAGSPRPDPREALRAATMEVKVGRLRGRAVPVWDVLASGYVSGAAREELLAEFGSGTLDLPALTRRLTAIIEEAEEAPGARPQLQDAWRGPREPGPAGRGDGDSGRSQREGQGEGETQEAAAAAAAARRQEQTLRDATMEVQRGQFQGRPVSVWDVLFSSYLSEARRDELLAQHAAGALGLPDLVAVLTRVIEETEERLSKVSFRGLRRQVSASELHTSGILGPETLRDLAQGTKTLQEVTEMDSVKRYLEGTSCIAGVLVPAKDQPGRQEKMSIYQAMWKGVLRPGTALVLLEAQAATGFVIDPVRNLRLSVEEAVAAGVVGGEIQEKLLSAERAVTGYTDPYTGQQISLFQAMQKDLIVREHGIRLLEAQIATGGVIDPVHSHRVPVDVAYRRGYFDEEMNRVLADPSDDTKGFFDPNTHENLTYVQLLRRCVPDPDTGLYMLQLAGRGSAVHQLSEELRCALRDARVTPGSGALQGQSVSVWELLFYREVSEDRRQDLLSRYRAGTLTVEELGATLTSLLAQAQAQARAEAEAGSPRPDPREALRAATMEVKVGRLRGRAVPVWDVLASGYVSGAAREELLAEFGSGTLDLPALTRRLTAIIEEAEEAPGARPQLQDAWRGPREPGPAGRGDGDSGRSQREGQGEGETQEAAAAAAAARRQEQTLRDATMEVQRGQFQGRPVSVWDVLFSSYLSEARRDELLAQHAAGALGLPDLVAVLTRVIEETEERLSKVSFRGLRRQVSASELHTSGILGPETLRDLAQGTKTLQEVTEMDSVKRYLEGTSCIAGVLVPAKDQPGRQEKMSIYQAMWKGVLRPGTALVLLEAQAATGFVIDPVRNLRLSVEEAVAAGVVGGEIQEKLLSAERAVTGYTDPYTGQQISLFQAMQKDLIVREHGIRLLEAQIATGGVIDPVHSHRVPVDVAYRRGYFDEEMNRVLADPSDDTKGFFDPNTHENLTYVQLLRRCVPDPDTGLYMLQLAGRGSAVHQLSEELRCALRDARVTPGSGALQGQSVSVWELLFYREVSEDRRQDLLSRYRASTLTVEELGATLTSLLAQAQAQARAEAEAGSPRPDPREALRAATMEVKVGRLRGRAVPVWDVLASGYVSRAAREELLAEFGSGTLDLPALTRRLTAIIEEAEEAPGARPQLQDAWRGPREPGPAGRGDGDSGRSQREGQGEGETQEAAAATAAARRQEQTLRDATMEVQRGQFQGRPVSVWDVLFSSYLSEARRDELLAQHAAGALGLPDLVAVLTRVIEETEERLSKVSFRGLRRQVSASELHTSGILGPETLRDLAQGTKTLQEVTEMDSVKRYLEGTSCIAGVLVPAKDQPGRQEKMSIYQAMWKGVLRPGTALVLLEAQAATGFVIDPVRNLRLSVEEAVAAGVVGGEIQEKLLSAERAVTGYTDPYTGQQISLFQAMQKDLIVREHGIRLLEAQIATGGVIDPVHSHRVPVDVAYRRGYFDEEMNRVLADPSDDTKGFFDPNTHENLTYVQLLRRCVPDPDTGLYMLQLAGRGSAVHQLSEELRCALRDARVTPGSGALQGQSVSVWELLFYREVSEDRRQDLLSRYRAGTLTVEELGATLTSLLAQAQAQARAEAEAGSPRPDPREALRAATMEVKVGRLRGRAVPVWDVLASGYVSGAAREELLAEFGSGTLDLPALTRRLTAIIEEAEEAPGARPQLQDAWRGPREPGPAGRGDGDSGRSQREGQGEGETQEAAAAAAAARRQEQTLRDATMEVQRGQFQGRPVSVWDVLFSSYLSEARRDELLAQHAAGALGLPDLVAVLTRVIEETEERLSKVSFRGLRRQVSASELHTSGILGPETLRDLAQGTKTLQEVTEMDSVKRYLEGTSCIAGVLVPAKDQPGRQEKMSIYQAMWKGVLRPGTALVLLEAQAATGFVIDPVRNLRLSVEEAVAAGVVGGEIQEKLLSAERAVTGYTDPYTGQQISLFQAMQKDLIVREHGIRLLEAQIATGGVIDPVHSHRVPVDVAYRRGYFDEEMNRVLADPSDDTKGFFDPNTHENLTYLQLLQRATLDPETGLLFLSLSLQ

SEQ ID NO: 1744 - protein, 267 aa, Homo sapiens [sequence omitted]

SEQ ID NO: 1745 - protein, 444 aa, Homo sapiens
MEEEGKKGKKPGIVSPFKRVFLKGEKSRDKKAHEKVTERRPLHTVVLSLPERVEPDRLLSDYIEKEVKYLGQLTSIPGYLNPSSRTEILHFIDNAKRAHQLPGHLTQEHDAVLSLSAYNVKLAWRDGEDIILRVPIHDIAAVSYVRDDAAHLVVLKTAQDPGISPSQSLCAESSRGLSAGSLSESAVGPVEACCLVILAAESKVAAEELCCLLGQVFQVVYTESTIDFLDRAIFDGASTPTHHLSLHSDDSSTKVDIKETYEVEASTFCFPESVDVGGASPHSKTISESELSASATELLQDYMLTLRTKLSSQEIQQFAALLHEYRNGASIHEFCINLRQLYGDSRKFLLLGLRPFIPEKDSQHFENFLETIGVKDGRGIITDSFGRHRRALSTTSSSTTNGNRATGSSDDRSAPSEGDEWDRMISDISSDIEALGCSMDQDSA

SEQ ID NO: 1746 - protein, 802 aa, Homo sapiens
MGYLRIFSPHPAKTGDGAQAEDLLLEVDLRDPVLQVEVGKFVSGTEMLHLAVLHSRKLCVYSVSGTLGNVEHGNQCQMKLMYEHNLQRTACNMTYGSFGGVKGRDLICIQSMDGMLMVFEQESYAFGRFLPGFLLPGPLAYSSRTDSFLTVSSCQQVESYKYQVLAFATDADKRQETEQQKLGSGKRLVVDWTLNIGEQALDICIVSFNQSASSVFVLGERNFFCLKDNGQIRFMKRLDWSPSCFLPYCSVSEGTINTLIGNHNNMLHIYQDVTLKWATQLPHIPVAVRVGCLHDLKGVIVTLSDDGHLQCSYLGTDPSLFQAPNVQSRELNYDELDVEMKELQKIIKDVNKSQGVWPMTEREDDLNVSVVVSPNFDSVSQATDVEVGTDLVPSVTVKVTLQNRVILQKAKLSVYVQPPLELTCDQFTFEFMSIPRVIQCKFRLPLKLICLPGQPSKTASHKITIDTNKSPVSLLSLFPGFASQSDDDQVNVMGFHFLGGARITVLASKTSQRYRIQSEQFEDLWLITNELILRLQEYFEKQGVKDFACSFSGSIPLQEYFELIDHHFELRINGEKLEELLSERAVQFRAIQRRLLARFKDKTPAPLQHLDTLLDGTYKQVIALADAVEENQGNLFQSFTRLKSATHLVILLIALWQKLSADQVAILEAAFLPLQEDTQELGWEETVDAAISHLLKTCLSKSSKEQALNLNSQLNIPKDTSQLKKHITLLCDRLSKGGRLCLSTDAAAPQTMVMPGGCTTIPESDLEERSVEQDSTELFTNHRHLTAETPRPEVSPLQGVSE

SEQ ID NO: 1747 - protein, 384 aa, Homo sapiens
MAATASPQPLATEDADSENSSFYYYDYLDEVAFMLCRKDAVVSFGKVFLPVFYSLIFVLGLSGNLLLLMVLLRYVPRRRMVEIYLLNLAISNLLFLVTLPFWGISVAWHWVFGSFLCKMVSTLYTINFYSGIFFISCMSLDKYLEIVHAQPYHRLRTRAKSLLLATIVWAVSLAVSIPDMVFVQTHENPKGVWNCHADFGGHGTIWKLFLRFQQNLLGFLLPLLAMIFFYSRIGCVLVRLRPAGQGRALKIAAALVVAFFVLWFPYNLTLFLHTLLDLQVFGNCEVSQHLDYALQVTESIAFLHCCFSPILYAFSSHRFRQYLKAFLAAVLGWHLAPGTAQASLSSCSESSILTAQEEMTGMNDLGERQSENYPNKEDVGNKSA

SEQ ID NO: 1748 - protein, 295 aa, Homo sapiens
MPVHTLSPGAPSAPALPCRLRTRVPGYLLRGPADGGARKPSAVERLEADKAKYVKSLHVANTRQEPVQPLLSKQPLFSPETRRTVLTPSRRALPGPCRRPQLDLDILSSLIDLCDSPVSPAEASRTPGRAEGAGRPPPATPPRPPPSTSAVRRVDVRPLPASPARPCPSPGPAAASSPARPPGLQRSKSDLSERFSRAAADLERFFNFCGLDPEEARGLGVAHLARASSDIVSLAGPSAGPGSSEGGCSRRSSVTVEERARERVPYGVSVVERNARVIKWLYGLRQARESPAAEG

SEQ ID NO: 1749 - protein, 334 aa, Homo sapiens
MGRRSSDTEEESRSKRKKKHRRRSSSSSSSDSRTYSRKKGGRKSRSKSRSWSRDLQPRSHSYDRRRRHRSSSSSSYGSRRKRSRSRSRGRGKSYRVQRSRSKSRTRRSRSRPRLRSHSRSSERSSHRRTRSRSRDRERRKGRDKEKREKEKDKGKDKELHNIKRGESGNIKAGLEHLPPAEQAKARLQLVLEAAAKADEALKAKERNEEEAKRRKEEDQATLVEQVKRVKEIEAIESDSFVQQTFRSSKEVKKSVEPSEVKQATSTSGPASAVADPPSTEKEIDPTSIPTAIKYQDDNSLAHPNLFIEKADAEEKWFKRLIALRQERLMGSPVA

SEQ ID NO: 1750 - protein, 306 aa, Homo sapiens [sequence omitted]

SEQ ID NO: 1751 - protein, 1044 aa, Homo sapiens
LRTPPCPPTVRRCRRSAAAMKASSGDQGSPPCFLRFPRPVRVVSGAEAELKCVVLGEPPPVVVWEKGGQQLAASERLSFPADGAEHGLLLTAALPTDAGVYVCRARNAAGEAYAAAAVTVLEPPASDPELQPAERPLPSPGSGEGAPVFLTGPRSQWVLRGAEVVLTCRAGGLPEPTLYWEKDGMALDEVWDSSHFALQPGRAEDGPGASLALRILAARLPDSGVYVCHARNAHGHAQAGALLQVHQPPESPPADPDEAPAPVVEPLKCAPKTFWVNEGKHAKFRCYVMGKPEPEIEWHWEGRPLLPDRRRLMYRDRDGGFVLKVLYCQAKDRGLYVCAARNSAGQTLSAVQLHVKEPRLRFTRPLQDVEGREHGIAVLECKVPNSRIPTAWFREDQRLLPCRKYEQIEEGTVRRLIIHRLKADDDGIYLCEMRGRVRTVANVTVKGPILKRLPRKLDVLEGENAVLLVETLEAGVEGRWSRDGEELPVICQSSSGHMHALVLPGVTREDAGEVTFSLGNSRTTTLLRVKCVKHSPPGPPILAEMFKGHKNTVLLTWKPPEPAPETPFIYRLERQEVGSEDWIQCFSIEKAGAVEVPGDCVPSEGDYRFRICTVSGHGRSPHVVFHGSAHLVPTARLVAGLEDVQVYDGEDAVFSLDLSTIIQGTWFLNGEELKSNEPEGQVEPGALRYRIEQKGLQHRLILHAVKHQDSGALVGFSCPGVQDSAALTIQESPVHILSPQDKVSLTFTTSERVVLTCELSRVDFPATWYKDGQKVEESELLVVKMDGRKHRLILPEAKVQDSGEFECRTEGVSAFFGVTVQDPPVHIVDPREHVFVHAITSECVMLACEVDREDAPVRWYKDGQEVEESDFVVLENEGPHRRLVLPATQPSDGGEFQCVAGDECAYFTVTITDVSSWIVYPSGKVYVAAVRLERVVLTCELCRPWAEVRWTKDGEEVVESPALLLQKEDTVRRLVLPAVQLEDSGEYLCEIDDESASFTVTVTESYQSQDSSNNNPELCVLLKKPKTRRLWSRFPPWRRTAGTE

SEQ ID NO: 1752 - protein, 48 aa, Homo sapiens
MSRKPRASSPLSNNHPPTPKRRGSGRFPRQPGREKGPIKEVPGTKGSP

SEQ ID NO: 1753 - protein, 586 aa, Homo sapiens
MNPTNTVFDAKRLIGRRFDDAVVQSDMKHWPFMVVNDAGRPKVQVEYKGETKSFYPEEVSSMVLTKMKEIAEAYLGKTVTNAVVTVPAYFNDSQRQATKDAGTIAGLNVLRIINEPTAAAIAYGLDKKVGAERNVLIFDLGGGTFDVSILTIEDGIFEVKSTAGDTHLGGEDFDNRMVNHFIAEFKRKHKKDISENKRAVRRLRTACERAKRTLSSSTQASIEIDSLYEGIDFYTSITRARFEELNADLFRGTLDPVEKALRDAKLDKSQIHDIVLVGGSTRIPKIQKLLQDFFNGKELNKSINPDEAVAYGAAVQAAILSGDKSENVQDLLLLDVTPLSLGIETAGGVMTVLIKRNTTIPTKQTQTFTTYSDNQPGVLIQVYEGERAMTKDNNLLGKFELTGIPPAPRGVPQIEVTFDIDANGILNVSAVDKSTGKENKITITNDKGRLSKEDIERMVQEAEKYKAEDEKQRDKVSSKNSLESYAFNMKATVEDEKLQGKINDEDKQKILDKCNEIINWLDKNQTAEKEEFEHQQKELEKVCNPIITKLYQSAGGMPGGMPGGFPGGGAPPSGGASSGPTIEEVD

SEQ ID NO: 1754 - protein, 178 aa, Homo sapiens
MFIISINSPVSGSNVARTGLFGLSARRLLAAAATRGLPAARVRWESSFSRTVVAPSAVAGKRPPEPTTPWQEDPEPEDENLYEKNPDSHGYDKDPVLDVWNMRLVFFFGVSIILVLGSTFVAYLPDYRCTGCPRAWDGMKEWSRREAERLVKYREANGLPIMESNCFDPSKIQLPEDE

SEQ ID NO: 1755 - protein, 521 aa, Homo sapiens
ARGGNDWATIGAALGRSASSVKDRCRLMKDTCNTGKWTEEEEKRLAEVVHELTSTEPGDIVTQGVSWAAVAERVGTRSEKQCRSKWLNYLNWKQSGGTEWTKEDEINLILRIAELDVADENDINWDLLAEGWSSVRSPQWLRSKWWTIKRQIANHKDVSFPVLIKGLKQLHENQKNNPTLLENKSGSGVPNSNTNSSVQHVQIRVARLEDNTAISSSPMAALQIPVQITHVSSADSPATVDSETITLNSGTLQTFEILPSFHLQPTGTPGTYLLQTSSSQGLPLTLTASPTVTLTAAAPASPEQIIVHALSPEHLLNTSDNVTVQCHTPRVIIQTVATEDITSSISQAELTVDSDIQSSDFPEPPDALEADTFPDEIHHPKMTVEPSFNDAHVSKFSDQNSTELMNSVMVRTEEEISDTDLKQEESPSDLASAYVTEGLESPTIEEQVDQTIDDETILIVPSPHGFIQASDVIDTESVLPLTTLTDPILQHHQEESNIIGSSLGSPVSEDSKDVEDLVNCH

SEQ ID NO: 1756 - protein, 260 aa, Homo sapiens
ARGPFLPRPPQPLLYQRGPSPPPPPPPPLPPSPPPPLPPWGPPPSPPPSPPLHVLGLLSWRRSYSRSPLWARGAAMADGGGGGGTGAVGGGGTSQASAGAATGATGASGGGGPINPASLPPGDPQLIALIVEQLKSRGLFDSFRRDCLADVDTKPAYQNLRQKVDNFVSTHLDKQEWNPTMNKNQLRNGLRQSVVQSGMLEAGVDRIISQVVDPKLNHIFRPQIERAIHEFLAAQKKAAVPAPPPEPEGQDPPAPSQDTS

SEQ ID NO: 1757 - protein, 404 aa, Homo sapiens
MAGRRAQPGSAPPRPAAPHPRPASRAFPQHCRPRDAERPPSPRSPLMPGCELPVGTCPDMCPAAERAQREREHRLHRLEVVPGCRQDPPRADPQRAVKEYSRPAAGKPRPPPSQLRPPSVLLATVRYLAGEVAESADIARAEVASFVADRLRAVRLDLALQGAGDAEAAVVLEAALATLLAVVARLGPDAARGPADPVLLQAQVQEGFGSLRRCYARGAGPHPRQPAFQGLFLLYNLGSVEALHEVLQLPAALRACPPLRKALAVDAAFREGNAARLFRLLQTLPYLPSCAVQCHVGHARREALARFARAFSTPKGQTLPLGFMVNLLALDGLREARDLCQAHGLPLDGEERVVFLRGRYVEEGLPPASTCKVLVESKLRGRTLEEVVMAEEEDEGTDRPGSPA

SEQ ID NO: 1758 - protein, 381 aa, Homo sapiens
MPFGNTHNKFKLNYKPEEEYPDLSKHNNHMAKVLTLELYKKLRDKETPSGFTVDDVIQTGVDNPGHPFIMTVGCVAGDEESYEVFKELFDPIISDRHGGYKPTDKHKTDLNHENLKGGDDLDPNYVLSSRVRTGRSIKGYTLPPHCSRGERRAVEKLSVEALNSLTGEFKGKYYPLKSMTEKEQQQLIDDHFLFDKPVSPLLLASGMARDWPDARGIWHNDNKSLLVWVNEEDHLRVISMEKGGNMKEVFRRFCVGLQKIEEIFKKAGHPFMWNQHLGYVLTCPSNLGTGLRGGVHVKLAHLSKHPKFEEILTRLRLQKRGTGGVDTAAVGSVFDVSNADRLGSSEVEQVQLVVDGVKLMVEMEKKLEKGQSIDDMIPAQK

SEQ ID NO: 1759 - protein, 999 aa, Homo sapiens
MENLESRLKNAPYFRCEKGTDSNPLCRKCETCVLAWKIFSTKEWFCRINDISQRRFLVGILKQLNSLYLLHYFQNILQTTQGKDFIYNRSRINLSKKEGKVVKSSLNQMLDKTVEQKMKEILYWFANSTQWTKANYTLLLLQMCNPKLLLTAANVIRVLFLREENNISGLNQDITDVCFSPEKDHSSKSATSQVYWTAKTQHTSLPLSKAPENEHLLGAASNPEEPWRNSLRCISKMNRLFSGKGDITKPGYDPCNLLVDLDDIRDLSSGFSKYRDFIRYLPIHLSKYILRMLDRHTLNKCASVSQHWAAMAQQVKMDLSAHGFIQNQITFLQGSYTRGIDPNYANKVSIPVPKMVDDGKSMRVKHPKWKLRTKNEYNLWTAYQNEETQQVLIEERNVFCGTYNVRILSDTWVQNRVIHYSGGDLIAVSSNRKIHLLDIIQVKAIPVEFRGHAGSVRALFLCEEENFLLSGSYDLSIRYWDLKSGVCTRIFGGHQGTITCMDLCKNRLVSGGRDCQVKVWDVDTGKCLKTFRHKDPILATRINDTYIVSSCERGLVKVWHIAMAQLVKTLSGHEGAVKCLFFDQWHLLSGSTDGLVMAWSMVGKYERCLMAFKHPKMVVNTESNVLMFQFEHIKWQYAVEKTKQKKNKEKEEEKEENSLMEILSKCNIQVHSPRESVSSKQTVIQELLPGKPPKSRVLLKPAKFSSAVLIEELQSQGKSKSPRRDADDVEKAQKQGQLETPGKLPSHPKKKSWKIPMSPDQFLLTVSTLQHAHNSGEFAYPCRPQTEITDVWGPSISYPRKVLNFKGKSIQRAVDRLRLSNPPIDVKRTSIPLEIQKLQPNLKISLHSPRVQSTIPQPMIIRSRFSGSLKGGDQVTSSIERAVCSTGPLTSMQVIKPNRMLAPQVGTATLSLKKERPRIYTALDPFRVNTEFVLLTVKEEKEHQEAKMKEYQARESTGVVDPGKVSKAAWIRKIKGLPIDNFTKQGKTAAPELGQNVFI

SEQ ID NO: 1760 - protein, 230 aa, Homo sapiens
  VARIANT 177: Xaa = Any Amino Acid
MPLPDTMFCAQQIHIPPELPDILKQFTKAAIRTQPADVLRWSAGYFSALSRGDPLPVKDRMEMPTATQKTDTGLTQGLLKVLHKQCHHKRYVELTDLEQKWKNLCLPKEKFKALLQLDPCENKIKWINFLALGCSMLGGSLNTALKHLCEILTDDPEGGPARIPFKTFSYVYRYLAXLDSDVSPLETESYLASLKENIDARKNGMIGLSDFFFPKRKLLESIENSEDVGH

SEQ ID NO: 1761 - protein, 430 aa, Homo sapiens
MATAVRAVGCLPVLCSGTAGHLLGRQCSLNTLPAASILAWKSVLGNGHLSSLGTRDTHPYASLSRALQTQCCISSPSHLMSQQYRPYSFFTKLTADELWKGALAETGAGAKKGRGKRTKKKKRKDLNRGQIIGEGRYGFLWPGLNVPLMKNGAVQTIAQRSKEEQEKVEADMIQQREEWDRKKKMKVKRERGWSGNSWGGISLGPPDPGPCGETYEDFDTRILEVRNVFTMTAKEGRKKSIRVLVAVGNGKGAAGFSIGKATDRMDAFRKAKNRAVHHLHYIERYEDHTIFHDISLRFKRTHIKMKKQPKGYGLRCHRAIITICRLIGIKDMYAKVSGSINMLSLTQGLFRGLSRQETHQQLADKKGLHVVEIREECGPLPIVVASPRGPLRKDPEPEDEVPDVKLDWEDVKTAQGMKRSVWSNLKRAAT

SEQ ID NO: 1762 - protein, 289 aa, Homo sapiens
MFVLLYVTSFAICASGQPRGNQLKGENYSPRYICSIPGLPGPPGPPGANGSPGPHGRIGLPGRDGRDGRKGEKGEKGTAGLRGKTGPLGLAGEKGDQGETGKKGPIGPEGEKGEVGPIGPPGPKGDRGEQGDPGLPGVCRCGSIVLKSAFSVGITTSYPEERLPIIFNKVLFNEGEHYNPATGKFICAFPGIYYFSYDITLANKHLAIGLVHNGQYRIKTFDANTGNHDVASGSTVIYLQPEDEVWLEIFFTDQNGLFSDPGWADSLFSGFLLYVDTDYLDSISEDDEL

SEQ ID NO: 1763 - protein, 556 aa, Homo sapiens
MVYRLPVFKRYMGNTPQKKAVFGQCRGLPCVAPLLTTVEEAPRGISARVWGHFPKWLNGSLLRIGPGKFEFGKDKYNHWFDGMALLHQFRMAKGTVTYRSKFLQSDTYKANSAKNRIVISEFGTLALPDPCKNVFERFMSRFELPGKAAAMTDDTNVNYVRYKGDYYLCTETNFMNKVDIETLEKTEKVDWSKFIAVNGATAHPHYDPDGTAYNMGNSFGPYGFSYKVIRVPPEEVDLGETIHGVQVICSIASTEKGKPSYYHSFGMTRNYIIFIEQPLKMNLWKIATSKIRGKAFSDGISWEPQCNTRFHVVEKRTGQLLPGRYYSKPFVTFHQINAFEDQGCVIIDLCCQDNGRTLEVYQLQNLRKAGEGLDQVHNSAAKSFPRRFVLPLNVSLNAPEGDNLSPLSYTSASAVKQADGTICCSHENLHQEDLEKEGGIEFPQIYYDRFSGKKYHFFYGCGFRHLVGDSLIKVDVVNKTLKVWREDGFYPSEPVFVPAPGTNEEDGGVILSVVITPNQNESNFLLVLDAKNFEELGRAEVPVQMPYGFHGTFIPI

SEQ ID NO: 1764 - protein, 1560 aa, Homo sapiens
PVCCAGSFRLDPVGYTASALGITHPCALARMKEASGVGGGHSPMCPPHCHMPPGPAGEWPGATVQQPRQRAPTALLQPDAAGPGGGGVSAGVAVLGACPSASEGVLPRPPGRSAPQPPEYPGRPDMAVPGWSAMVRSRLTATSTSQATDHTFLQKSHYHHGDHPSYAKPRLPLPVFTVRHYAGTVTYQVHKFLNRNRDQLDPAVVEMLGQSQLQLVGSLFQEAEPQSRGGRGRPTLASRFQQALEDLIARLGRSHVYFIQCLTPNPGKLPGLFDVGHVTEQLHQAAILEAVGTRSANFPVRVPFEAFLASFQALGSEGQEDLSDREKCGAVLSQVLGAESPLYHLGATKVLLQEQGWQRLEELRDQQRSQALVDLHRSFHTCISRQRVLPRMQARMRGFQARKRYLRRRAALGQLNTILLVAQPLLQRRQRLQLGRWQGWHSSERALERVPSMELGRLEIPAELAVMLKTAESHRDALAGSITECLPPEVPARPSLTLPADIDLFPFSSFVAIGFQEPSLPRPGQPLAKPLTQLDGDNPQRALDINKVMLRLLGDGSLESWQRQIMGAYLVRQGQCWPGLRNELFSQLVAQLWQNPDEQQSQRGWALMAVLLSAFPPLPVLQKPLLKFVSDQAPRGMAALCQHKLLGALEQSQLASGATRAHPPTQLEWLAGWRRGRMALDVFTFSEECYSAEVESWTTGEQLAGWILQSRGLEAPPRGWSVSLHSRDAWQDLAGCDFVLDLISQTEDLGDPARPRSYPITPLGSAEAIPLAPGIQAPSLPPGPPPGPAPTLPSRDHTGEVQRSGSLDGFLDQIFQPVISSGLSDLEQSWALSSRMKGGGAIGPTQQGYPMVYPGMIQMPAYQPGMVPAPMPMMPAMGTVPAMPAMVVPPQPPLPSLDAGQLAVQQQNFIQQQALILAQQMTAQAMSLSLEQQMQQRQQQARASEAASQASPSAVTSKPRKPPTPPEKPQRDLGSEGGCLRETSEEAEDRPYQPKSFQQKRNYFQRMGQPQITVRTMKPPAKVHIPQGEAQEEEEEEEEEEEQEEQEVETRAVPSPPPPPIVKKPLKQGGAKAPKEAEAEPAKETAAKGHGQGPAQGRGTVVRSSDSKPKRPQPSREIGNIIRMYQSRPGPVPVPVQPSRPPKAFLRKIDPKDEALAKLGINGAHSSPPMLSPSPGKGPPPAVAPRPKAPLQLGPSSSIKEKQGPLLDLFGQKLPIAHTPPPPPAPPLPLPEDPGTLSAERRCLTQPVEDQGVSTQLLAPSGSVCFSYTGTPWKLFLRKEVFYPRENFSHPYYLRLLCEQILRDTFSESCIRISQNERRKMKDLLGGLEVDLDSLTTTEDSVKKRIVVAARDNWANYFSRFFPVSGESGSDVQLLAVSHRGLRLLKVTQGPGLRPDQLKILCSYSFAEVLGVECRGGSTLELSLKSEQLVLHTARARAIEALVELFLNELKKDSGYVIALRSYITDNCSLLSFHRGDLIKLLPVATLEPGWQFGSAGGRSGLFPADIVQPAAAPDFSFSKEQRSGWHKGQLSNGEPGLARWDRASEVRKMGEGQAEARPA

SEQ ID NO: 1765 - protein, 1560 aa, Homo sapiens; identical to SEQ ID NO: 1764

SEQ ID NO: 1766 - protein, 572 aa, Homo sapiens
SSTHGSRFPLCGGRRDHKGLTHIFNPPPKRFESILEGLFGPALLKDLSLFKDCEPESISDWTFDENCLFCCLRRDKVKGHLVGLDEPASGAGQEALLKQEQAKIIRFERQAEEFLNAVFYRKDSPWVSDPNIPLVAREIMQRMIQQFAAEYTSKNSSTQDPSQPNSTKNQSLPKASPVTTSPTAATTQNPVLSKLLMADQDSPLDLTVRKSQSEPSEQDGVLDLSTKKSPCAGSTSLSHSPGCSSTQGNGRPGRPSQYRPDGLRSGDGVPPRSLQDGTREGFGHSTSLKVPLARSLQISEELLSRNQLSTAASLGPSGLQNHGQHLILSREASWAKPHYEFNLSRMKFRGNGALSNISDLPFLAENSAFPKMALQAKQDGKKDVSHSSPVDLKIPQVRGMDLSWESRTGDQYSYSSLVMGSQTESALSKKLRAILPKQSRKSMLDAGPDSWGSDAEQSTSGQPYPTSDQEGDPGSKQPRKKRGRYRQYNSEILEEAISVVMSGKMSVSKAQSIYGIPHSTLEYKVKERLGTLKNPPKKKMKLMRSEGPDVSVKIELDPQGEAAQSANESKNE

SEQ ID NO: 1767 - protein, 539 aa, Homo sapiens
EVLRVQDKYFHIKCFVCKACGCDLAEGGFFVRQGEYICTLDYQRLYGTRCFSCDQFIEGEVVSALGKTYHPDCFVCAVCRLPFPPGDRVTFNGKECMCQKCSLPVSVGSSAHLSQGLRSCGGCGTEIKNGQALVALDKHWHLGCFKCKSCGKLLNAEYISKDGLPYCEADYHAKFGIRCDSCEKYITGRVLEAGEKHYHPSCALCVRCGQMFAEGEEMYLQGSSIWHPACRQAARTEDRNKETRTSSESIISVPASSTSGSPSRVIYAKLGGEILDYRDLAALPKSKAIYDIDRPDMISYSPYISHSAGDRQSYGEGDQDDRSYKQCRTSSPSSTGSVSLGRYTPTSRSPQHYSRPGSESGRSTPSLSVLSDSKPPPSTYQQAPRHFHVPDTGVKDNIYRKPPIYRQHAARRSDGEDGSLDQDNRKKSSWLMLKGDADTRTNSPDLDTQSLSHSSGTDRDPLQRMAGDSFHSQYKIYPYDSLIVTNRIRVKLPKDVDRTRLERHLSPEEFQEVFGMSIEEFDRLALWKRNDLKKKALLF

SEQ ID NO: 1768 - protein, 958 aa, Homo sapiens
GRGRGGGASGGGGGSSMKRRAGLGGSMRSVVGFLSQRGLHGDPLLTQDFQRRRLRGCRNLYKKDLLGHFGCVNAIEFSNNGGQWLVSGGDDRRVLLWHMEQAIHSRVKPIQLKGEHHSNIFCLAFNSGNTKVFSGGNDEQVILHDVESSETLDVFAHEDAVYGLSVSPVNDNIFASSSDDGRVLIWDIRESPHGEPFCLANYPSAFHSVMFNPVEPRLLATANSKEGVGLWDIRKPQSSLLRYGGNLSLQSAMSVRFNSNGTQLLALRRRLPPVLYDIHSRLPVFQFDNQGYFNSCTMKSCCFAGDRDQYILSGSDDFNLYMWRIPADPEAGGIGRVVNGAFMVLKGHRSIVNQVRFNPHTYMICSSGVEKIIKIWSPYKQPGCTGDLDGRIEDDSRCLYTHEEYISLVLNSGSGLSHDYANQSVQEDPRMMAFFDSLVRREIEGWSSDSDSDLSESTILQLHAGVSERSGYTDSESSASLPRSPPPTVDESADNAFHLGPLRVTTTNTVASTPPTPTCEDAASRQQRLSALRRYQDKRLLALSNESDSEENVCEVELDTDLFPRPRSPSPEDESSSSSSSSSSEDEEELNERRASTWQRNAMRRRQKTTREDKPSAPIKPTNTYIGEDNYDYPQIKVDDLSSSPTSSPERSTSTLEIQPSRASPTSDIESVERKIYKAYKWLRYSYISYSNNKDGETSLVTGEADEGRAGTSHKDNPAPSSSKEACLNIAMAQRNQDLPPEGCSKDTFKEETPRTPSNGPGHEHSSHAWAEVPEGTSQDTGNSGSVEHPFETKKLNGKALSSRAEEPPSPPVPKASGSTLNSGSGNCPRTQSDDSEERSLETICANHNNGRLHPRPPHPHNNGQNLGELEVVAYSSPGHSDTDRDNSSLTGTLLHKDCCGSEMACETPNAGTREDPTDTPATDSSRAVHGHSGLKRQRIELEDTDSENSSSEKKLKT

SEQ ID NO: 1769 - protein, 523 aa, Homo sapiens
LRNSGLSYCSKFIKRNTKENKDCEMPTLEPGNVISILISSEFLKMDSLVEQCIQYCHKNMNAIVATPCNMNCINANLLTRIADLFSHNEVDDLKDKKDKFKSKLFCKKIERLFDPEYLNPDSRSNAATLYRCCLCKKLLTKETERRIPCIPGKINVDRRGNIVYIHIRDKTWDVHEYLNSLFEELKSWRDVYWRLWGTINWLTCSRCYQAFLCIEFSHCQYHSETVVYPTAASSLNTVGTGIYPCCNQKVLRFDPTQLTKGCKVRDHMVTLRDQGEGGDLPSCPTARMLDDLHKYRDVIVVPFSKDTVSDVGVGLCDEKGIECDVLLEPNTPWGPKTGELNAFLSLKNWTLQLKQQSLFSEEEEYTTGSEVTEDEVGDEEEVSKKQRKKEKPKKFTRQPKKQVSSPCAQRKEKALEKSASRDVSPFVMSMQKNKWDATRSLRFNQDAQREDDQRRMTEITGHLIKMRLGDLDRVKSKEAKEFAGGIYSRLEAQIKASVPVSARQSSSEKNTRSKSRFGQGRPA

SEQ ID NO: 1770 - protein, 1341 aa, Homo sapiens
VNPSKCGCPFALKMAACQLLLEITTFLRETFSCLPRPRTEPLVDLESCRLRLDPELDRHRYERKISFAGVLDENEDSKDSLHSSSHTLKSDAGVEEKKVPSRKIRIGGSRLLQIKGTRSFQVKKGGSLSSIRRVGSLKSSKLSRQDSESEAEELQLSQSRDTVTDLEGSPWSASEPSIEPEGMSNAGAEENYHRNMSWLHVMILLCNQQSFICTHVDYCHPHCYLHHSRSCARLVRAIKLLYGDSVDSLRESSNISSVALRGKKQKECSDKSCLRTPSLKKRVSDANLEGKKDSGMLKYIRLQVMSLSPAPLSLLIKAAPILTEEMYGDIQPAAWELLLSMDEHMAGAAAAMFLLCAVKVPEAVSDMLMSEFHHPETVQRLNAVLKFHTLWRFRYQVWPRMEEGAQQIFKIPPPSINFTLPSPVLGMPSVPMFDPPWVPQCSGSVQDPINEDQSKSFSARAVSRSHQRAEHILKNLQQEEEKKRLGREASLITAIPITQEACYEPTCTPNSEPEEEEEVTNLASRRLSVSPSCTSSTSHRNYSFRRGSVWSVRSAVSAEDEEHTTEHTPNHHVPQPPQAVFPACICAAVLPIVHLMEDGEVREDGVAVSAVAQQVLWNCLIEDPSTVLRHFLEKLTISNRQDELMYMLRKLLLNIGDFPAQTSHILFNYLVGLIMYFVRTPCEWGMDAISATLTFLWEVVGYVEGLFFKDLKQTMKKEQCEVKLLVTASMPGTKTLVVHGQNECDIPTQLPVHEDTQFEALLKECLEFFNIPESQSTHYFLMDKRWNLIHYNKTYVRDIYPFRRSVSPQLNLVHMHPEKGQELIQKQVFTRKLEEVGRVLFLISLTQKIPTAHKQSHVSMLQEDLLRLPSFPRSAIDAEFSLFSDPQAGKELFGLDTLQKSLWIQLLEEMFLGMPSEFPWGDEIMLFLNVFNGALILHPEDSALLRQYAATVINTAVHFNHLFSLSGYQWILPTMLQVYSDYESNPQLRQAIEFACHQFYILHRKPFVLQLFASVAPLLEFPDAANNGPSKGVSAQCLFDLLQSLEGETTDILDILELVKAEKPLKSLDFCYGNEDLTFSISEAIKLCVTVVAYAPESFRSLQMLMVLEALVPCYLQKLKRQTSQVETVPAAREEIAATAALATSLQALLYSVEVLTRPMTAPQMSRCDQGHKGTTTANHTMSSGVNTRYQEQGAKLHFIRENLHLLEEGQGIPREELDERIAREEFRRPRESLLNICTEFYKHCGPRLKILQNLAGEPRVIALELLDVKSHMRLAEIAHSLLKLAPYDTQTMESRGLRRYIMEMLPITDWTAEAVRPALILILKRLDRMFNKIHKMPTLR

SEQ ID NO: 1771 - protein, 1341 aa, Homo sapiens; identical to SEQ ID NO: 1770

SEQ ID NO: 1772 - protein, 708 aa, Homo sapiens
RKPALPSLLGAQRLSQLRAQPGADPEGRRKPSGRASFLCCLPGLGRPIPRPELRSLPPHPSLGFTRTEPGAGCRPRLESTFQHFGQRPGRPGPFGLAMASVQQGEKQLFEKFWRGTFKAVATPRPESIIVASITARKPLPRTEPQNNPVVPAQDGPSEKLGQHLATEPLGTNSWERDKTCRELGATRGHSASHDKDLTPPPSSRGKKKKKKSTRKKRRRSSSYSPSPVKKKKKKSSKKHKRRRSFSKKRRHSSSSPKSKRRDEKRHKKQSRSRPRKSHRHRHHRCPSRSQSSESRPSSCESRHRGRSPEEGQKSRRRHSRRCSKTLCKDSPEAQSSRPPSQPLQMLGYLSARGVITGSGSAADLFTKTASPLTTSRGRSQEYDSGNDTSSPPSTQTSSARSRGQEKGSPSGGLSKSRELNSGNTSDSGNSFTTSSPQNKGAMLENLSPTSRGRESRGFQSPCLECAEVKKSSLVPSTARSSPMKGCSRSSSYASTRSSSHSSRSPNPRASPRYTQSRSTSSEKRSYSRSPSYSSKSGKRSPPSRSSRSRRSPSYSRYSPSRERDPKYSEKDSQQRERERARRRRRSYSPMRKRRRDSPSHLEARRITSARKRPIPYYRPSPSSSGSLSSTSSWYSSSSSRSASRSYSRSWSRSRSRRRSRTRTSSSSSSRSPSPGSRSRSRSRSRSRSRSRSQSRSYSSADSYSSTRR

SEQ ID NO: 1773 - protein, 624 aa, Homo sapiens
EGQEPAGCGDPQGGQPRHSLHLTALVQLVKEIPEFLFGEVKGAMDSPESESRGASLDGERASPEAAAREPCPLRGLLSCLPDGPTSQPHLATTPTDSSCSSGPTGDGVQGSPLPIKTADKPWPTRKEGPGALGGEPSPPTHSPSRRKSHRGQERGTSEAGISPGNSPLQGLINCLKEILVPGPRHPETSPSFLPPLPSLGTSRLTRADLGPGSPPWAVKTEAVSGDCPLQGLLHCLKELPEAQDRHPSPSGVGNRRLQENPGAWKRGSGGPGYLLTPPPHPDLGAGGLLSVKMENSWVQSPPGPASCQPGRQPLSPSATGDTRGVPQPSWGPEAQAASASSSPLEALEACLKGIPPNGSSPSQLPPTSCSQNPQPGDSRSQKPELQPHRSHSEEATREPVLPLGLQSCVRDGPSRPLAPRGTPTSFSSSSSTDWDLDFGSPVGNQGQHPGKGSPPGSSPLQGLENCLKEIPVPVLRPAWPCSSAADRGPRRAEPRNWTADKEGSAPKPSPLHCLESALRGILPVRPLRFACVGGPSPSPSPGSSSSFSGSEGEDPRPEPELWKPLPQERDRLPSCKPPVPLSPCPGGTPAGSSGGSPGEDPRRTEPRYSSGSLPGFSAGEKAQG

SEQ ID NO: 1774 - protein, 452 aa, Homo sapiens
VSVISEADPQALLQAMKDLDGMDADILGLKKSNSAPSKKAAKDPGKGELPNHPKPAGGAIPTKKSLPSPSSSGHQNRRFSSEDLEDPLGGLLSYDEGGITKQPPVTQSKTASDKSPSTVRDQGPSIPLTPGDTPIRKKEELLFDDGDDIMATLGFGDSPKAEKRQIGDQEGPRPARSTLDELLGRGMATKLLARPGTGEHREFKLDKKYQRPQDSEDMWGDEDFTFGAYQPTVVSSEGRQSRRQSVSRFFADSGADPKGEPGSKQSPPMASSPIQPRKGGADWLGLKDEDLDLFPASPTREAHRESSVPVTPSVPPPASQHSTPAGLPPSRAKPPTEGAGSPAKASQASKLRASKEEKEDWLSHALSRKKSQGLAREQHAGTSEGLHLAGTAGHPPSGSLTWAFCHLHLERCLSSANLSPAHKGLSTQLLEGVLEQLHEKDRVSGLVSRGPL

SEQ ID NO: 1775 - protein, 765 aa, Homo sapiens
HSKAFIVAMPTTSKADVQQNTEDNGKPEKPEPSSPSPRAPASSQHPSVPASPQGRNAKDLLLDLKNKILANGGAPRKPQLRAKKAEELDLQSTEITGEEELGSREDSPMSPSDTQDQKRTLRPPSRHGHSVVAPGRTAVRARMPALPRREGVDKPGFSLATQPRPGAPPSASASPAHHASTQGTSHRPSLPASLNDNDLVDSDEDERAVGSLHPKGAFAQPRPALSPSRQSPSSVLRDRSSVHPGAKPASPARRTPHSGAAEEDSSASAPPSRLSPPHGGSSRLLPTQPHLSSPLSKGGKDGEDAPATNSNAPSRSTMSSSVSSHLSSRTQVSEGAEASDGESHGDGDREDGGRQAEATAQTLRARPASGHFHLLRHKPFAANGRSPSRFSIGRGPRLQPSSSPQSTVPSRAHPRVPSHSDSHPKLSSGIHGDEEDEKPLPATVVNDHVPSSSRQPISRGWEDLRRSPQRGASLHRKEPIPENPKSTGADTHPQGKYSSLASKAQDVQQSTDADTEGHSPKAQPGSTDRHASPARPPAARSQQHPSVPRRMTPGRAPEQQPPPPVATSQHHPGPQSRDAGRSPSQPRLSLTQAGRPRPTSQGRSHSSSDPYTASSRGMLPTALQNQDEDAQGSYDDDSTEVEAQDVRAPAHAARAKEAAASLPKHQQGRQRRRWEPRQGREGACHRACPSRREPGSCEATSPPTSRQLPQGLPRPFPTAASQRCHREPRRGHPPLAAVHHARPAWPLLHHPDAVLAPEDDACQIP

SEQ ID NO: 1776 - protein, 832 aa, Homo sapiens
GGHPGMPGGMGTPGEPGPQGPPGSRGPPGMRGAKGRRGPRGPDGPAGEQGSRGLKGPPGPQGRPGRPGQQGVAGERGHLGSRGFPGIPGPSGPPGTKGLPGEPGPQGPQGPIGPPGEMGPKGPPGAVGEPGLPGEAGMKGDLGPLGTPGEQGLIGQRGEPGLEGDSGPMGPDGLKGDRGDPGPDGEHGEKGQEGLMGEDGPPGPPGVTGVRGPEGKSGKQGEKGRTGAKGAKGYQGQLGEMGVPGDPGPPGTPGPKGSRGSLGPTGAPGRMGAQGEPGLAGYDGHKGIVGPLGPPGPKGEKGEQGEDGKAEGPPGPPGDRGPVGDRGDRGEPGDPGYPGQEGVQGLRGKPGQQGQPGHPGPRGWPGPKGSKGAEGPKGKQGKAGAPGRRGVQGLQGLPGPRGVVGRQGLEGIAGPDGLPGRDGQAGQQGEQGDDGDPGPMGPAGKRGNPGVAGLPGAQGPPGFKGESGLPGQLGPPGKRGTEGRTGLPGNQGEPGSKGQPGDSGEMGFPGMAGLFGPKGPPGDIGFKGIQGPRGPPGLMGKEGIVGPLGILGPSGLPGPKGDKGSRGDWGLQGPRGPPGPRGRPGPPGPPGGPIQLQQDDLGAAFQTWMDTSGALRPESYSYPDRLVLDQGGEIFKTLHYLSNLIQSIKTPLGTKENPARVCRDLMDCEQKMVDGTYWVDPNLGCSSDTIEVSCNFTHGGQTCLKPITASKVEFAISRVQMNFLHLLSSEVTQHITIHCLNMTVWQEGTGQTPAKQAVRFRAWNGQIFEAGGQFRPEVSMDGCKVQDGRWHQTLFTFRTQDPQQLPIISVDNLPPASSGKQYRLEVGPACFL

SEQ ID NO: 1777 - protein, 534 aa, Homo sapiens
PQRPAMKPHLKQWRQRMLFGIFAWGLLFLLIFIYFTDSNPAEPVPSSLSFLETRRLLPVQGKQRAIMGAAHEPSPPGGLDARQALPRAHPAGSFHAGPGDLQKWAQSQDGFEHKEFFSSQVGRKSQSAFYPEDDDYFFAAGQPGWHSHTQGTLGFPSPGEPGPREGAFPAAQVQRRRVKKRHRRQRRSHVLEEGDDGDRLYSSMSRAFLYRLWKGNVSSKMLNPRLQKAMKDYLTANKHGVRFRGKREAGLSRAQLLCQLRSRARVRTLDGTEAPFSALGWRRLVPAVPLSQLHPRGLRSCAVVMSAGAILNSSLGEEIDSHDAVLRFNSAPTRGYEKDVGNKTTIRIINSQILTNPSHHFIDSSLYKDVILVAWDPAPYSANLNLWYKKPDYNLFTPYIQHRQRNPNQPFYILHPKFIWQLWDIIQENTKEKIQPNPPSSGFIGILIMMSMCREVHVYEYIPSVRQTELCHYHELYYDAACTLGAYHPLLYEKLLVQRLNMGTQGDLHRKGKVVLPGFQAVHCPAPSPVIPHS

SEQ ID NO: 1778 - protein, 46 aa, Homo sapiens
QLFSEAVAPAIEKDFKDGTFDPDNLEKYGFEPTQEGKLFQLYPRNF

SEQ ID NO: 1779 - protein, 32 aa, Homo sapiens
SNAKEPKTRAGGFASALERHSELLQKVEPLQK

SEQ ID NO: 1780 - protein, 34 aa, Homo sapiens
IKVQEKYVWNKRESTEKGSPLGEVVEQGITRVRN

SEQ ID NO: 1781 - protein, 355 aa, Homo sapiens
MAEVHRRQHARVKGEAPAKSSTLRDEEELGMASAETLTVFLKLLAAGFYGVSSFLIVVVNKSVLTNYRFPSSLCVGLGQMVATVAVLWVGKALRVVKFPDLDRNVPRKTFPLPLLYFGNQITGLFSTKKLNLPMFTVLRRFSILFTMFAEGVLLKKTFSWGIKMTVFAMIIGAFVAASSDLAFDLEGYAFILINDVLTAANGAYVKQKLDSKELGKYGLLYYNALFMILPTLAIAYFTGDAQKAVEFEGWADTLFLLQFTLSCVMGFILMYATVLCTQYNSALTTTIVGCIKNILITYIGMVFGGDYIFTWTNFIGLNISIAGSLVYSYITFTEEQLSKQSEANNKLDIKGKGAV

SEQ ID NO: 1782 - protein, 173 aa, Homo sapiens
MPMKGRFPIRRTLQYLSQGNVVFKDSVKVMTVNYNTHGELGEGARKFVFFNIPQIQYKNPWVQIMMFKNMTPSPFLRFYLDSGEQVLVDVETKSNKEIMEHIRKILGKNEETLREEEEEKKQLSHPANFGPRKYCLRECICEVEGQVPCPSLVPLPKEMRGKYKAALKADAQD

SEQ ID NO: 1783 - protein, 260 aa, Homo sapiens
LPSPPRARSGVFCPTSGAGSGIGRAVSVRLAGEGATVAACDLDRAAAQETVRLLGGPGSKEGPPRGNHAAFQADVSEARAARCLLEQVQACFSRPPSVVVSCAGITQDEFLLHMSEDDWDKVIAVNLKGTFLVTQAAAQALVSNGCRGSIINISSIVGKVGNVGQTNYAASKAGVIGLTQTAARELGRHGIRCNSVLPGFIATPMTQKVPQKVVDKITEMIPMGHLGDPEDVADVVAFLASEDSGYITGTSVEVTGGLFM

SEQ ID NO: 1784 - protein, 322 aa, Homo sapiens [sequence omitted]

SEQ ID NO: 1785 - protein, 212 aa, Homo sapiens [sequence omitted]

SEQ ID NO: 1786 - protein, 674 aa, Homo sapiens
MLKNKAKRSLTESLESILSRGNKARGLQEHSISVDLDSSLSSTLSNTSKEPSVCEKEALPISESSFKLLGSSEDLSSDSESHLPEEPAPLSPQQAFRRRANTLSHFPIECQEPPQPARGSPGVSQRKLMRYHSVSTETPHERKDFESKANHLGDSGGTPVKTRRHSWRQQIFLRVATPQKACDSSSRYEDYSELGELPPRSPLEPVCEDGPFGPPPEEKKRTSRELRELWQKAILQQILLLRMEKENQKLQASENDLLNKRLKLDYEEITPCLKEVTTVWEKMLSTPGRSKIKFDMEKMHSAVGQGVPRHHRGEIWKFLAEQFHLKHQFPSKQQPKDVPYKELLKQLTSQQHAILIDLGRTFPTHPYFSAQLGAGQLSLYNILKAYSLLDQEVGYCQGLSFVAGILLLHMSEEEAFKMLKFLMFDMGLRKQYRPDMIILQIQMYQLSRLLHDYHRDLYNHLEEHEIGPSLYAAPWFLTMFASQFPLGFVARVFDMIFLQGTEVIFKVALSLLGSHKPLILQHENLETIVDFIKSTLPNLGLVQMEKTINQVFEMDIAKQLQAYEVEYHVLQEELIDSSPLSDNQRMDKLEKTNSSLRKQNLDLLEQLQVANGRIQSLEATIEKLLSSESKLKQAMLTLELERSALLQTVEELRRRSAEPSDREPECTQPEPTGD

SEQ ID NO: 1787 - protein, 585 aa, Homo sapiens [sequence omitted]

SEQ ID NO: 1788 - protein, 1287 aa, Homo sapiens
MVPGEENQLVPKEAPLDHTSDKSLLDANFEPGKKNFLHLTDKDGEQPQILLEDSSAGEDSVHDRFIGPLPREGSVGSTSDYVSQSYSYSSILNKSETGYVGLVNQAMTCYLNSLLQTLFMTPEFRNALYKWEFEESEEDPVTSIPYQLQRLFVLLQTSKKRAIETTDVTRSFGWDSSEAWQQHDVQELCRVMFDALEQKWKQTEQADLINELYQGKLKDYVRCLECGYEGWRIDTYLDIPLVIRPYGSSQAFASVEEALHAFIQPEILDGPNQYFCERCKKKCDARKGLRFLHFPYLLTLQLKRFDFDYTTMHRIKLNDRMTFPEELDMSTFIDVEDEKSPQTESCTDSGAENEGSCHSDQMSNDFSNDDGVDEGICLETNSGTEKISKSGLEKNSLIYELFSVMAHSGSAAGGHYYACIKSFSDEQWYSFDDQHVSRITQEDIKKTHGGSSGSRGYYSSAFASSTNAYMLIYRLKDPARNAKFLEVGEYPEHIKNLVQKERELEEQEKRQREIERNTCKIKLFCLHPTKQVMMENKLEVHKDKTLKEAVEMAYKMMDLEEVIPLDCCRLVKYDEFHDYLERSYEGEEDTPMGLLLGGVKSTYMFDLLLETRKPDQVFQSYKPGEVMVKVHVVDLKAESVAAPITVRAYLNQTVTEFKQLISKAIHLPAETMRIVLERCYNDLRLLSVSSKTLKAEGFFRSNKVFVESSETLDYQMAFADSHLWKLLDRHANTIRLFVLLPEQSPVSYSKRTAYQKAGGDSGNVDDDCERVKGPVGSLKSVEAILEESTEKLKSLSLQQQQDGDNGDSSKSTETSDFENIESPLNERDSSASVDNRELEQHIQTSDPENFQSEERSDSDVNNDRSTSSVDSDILSSSHSSDTLCNADNAQIPLANGLDSHSITSSRRTKANEGKKETWDTAEEDSGTDSEYDESGKSRGEMQYMYFKAEPYAADEGSGEGHKWLMVHVDKRITLAAFKQHLEPFVGVLSSHFKVFRVYASNQEFESVRLNETLSSFSDDNKITIRLGRALKKGEYRVKVYQLLVNEQEPCKFLLDAVFAKGMTVRQSKEELIPQLREQCGLELSIDRFRLRKKTWKNPGTVFLDYHIYEEDINISSNWEVFLEVLDGVEKMKSMSQLAVLSRRWKPSEMKLDPFQEVVLESSSVDELREKLSEISGIPLDDIEFAKGRGTFPCDISVLDIHQDLDWNPKVSTLNVWPLYICDDGAVIFYRDKTEELMELTDEQRNELMKKESSRLQKTGHRVTYSPRKEKALKIYLDGAPNKDLTQD

SEQ ID NO: 1789 - protein, 455 aa, Homo sapiens
MVEQSEKLNGVLEASRLWDNMRKLGECTEEAHQMTHDGYLKLWQLSKPSLASFDAIFVDEAQDCTPAIMNIVLSQPCGKIFVGDPHQQIYTFRGAVNALFTVPHTHVFYLTQSFRFGVEIAYVGATILDVCKRVRKKTLVGGNHQSGIRGDAKGQVALLSRTNANVFDEAVRVTEGEFPSRIHLIGGIKSFGLDRIIDIWILLQPEEERRKQNLVIKDKFIRRWVHKEGFSGFKRYVTAAEDKELEAKIAVVEKYNIRIPELVQRIEKCHIEDLDFAEYILGTVHKAKGLEFDTVHVLDDFVKVPCARHNLPQLPHFRVESFSEDEWNLLYVAVTRAKKRLIMTKSLENILTLAGEYFLQAELTSNVLKTGVVRCCVGQCNNAIPVDTVLTMKKLPITYSNRKENKGGYLCHSCAEQRIGPLAFLTASPEQVRAMERTVENIVLPRHEALLFLVF

SEQ ID NO: 1790 - protein, 732 aa, Homo sapiens
MERGGGGSGTGSRPEGTARGTSLPGKIAEPGAVRTSQPNYRPQGMEGFLKSDERQRLAKERREEREKCLAAREQQILEKQKRARLQYEKQMEERWRKLEEQRQREDQKRAAVEEKRKQKLREEEERLEAMMRRSLERTQQLELKKKYSWGAPLAIGPGGHDACDKLSTSTMSLPKPTEPPMNKRLSSSTVAISYSPDRVFHVCPRLAPLGPLNPSYKSSPTRNIEKKKATSTSTSGAGDVGKEALSGGEASLVEKVKRGQRTATSLPVVNFGSPLRRCEFSGGIPKRPSSPVISKTATKAYPQSPKTTKPPYPGSPVKYRLPALSGQDMPKRKAEKEKSNKEREGTLAQQAAGPQGEEALEKHVVDKHASEKHAAAAGGKAENSAALGKPTAGTTDAGEAAKILAEKRRQARLQKEQEEQERVEKEEQDRLEREELKRKAEEERLRLEEEARKQEEERKRQEEEKKKQEGEEKRKAGEEAKRKAEEELLLKEKQEQEKQEKAMIEKQKEAAETKAREVAEQMRLEREQIMLQIEQERLERKKRIDEIMKRTRKSDVPPQVKKEDPKVGVQPAVCVEKKTKLVVPNKMEINGLNTCQEVNGVDHAAPETYPQDIFSNGLKPAGGLIHLDALDGKSNSLDDSTEEVQSMDVSPVSKEELISIPEFSPVSEMIPGVSLDQNGTGNARALQDLLDFTGPPTFPKRSSENLSLDDCNKNLIEGFNSPGQETPLNTFC

SEQ ID NO: 1791 - protein, 504 aa, Homo sapiens
MAACRYCCSCLRLRPLSDGPFLLPRRDRALTQLQVRALWSSAGSRAVAVDLGNRKLEISSGKLARFADGSAVVQSGDTAVMVTAVSKTKPSPSQFMPLVVDYRQKAAAAGRIPTNYLRREVGTSDKEILTSRIIDRSIRPLFPAGYFYDTQVLCNLLAVDGVNEPDVLAINGASVALSLSDIPWNGPVGAVRIGIIDGEYVVNPTRKEMSSSTLNLVVAGAPKSQIVMLEASAENILQQDFCHAIKVGVKYTQQIIQGIQQLVKETGVTKRTPQKLFTPSPEIVKYTHKLAMERLYAVFTDYEHDKVSRDEAVNKIRLDTEEQLKEKFPEADPYEIIESFNVVAKEVFRSIVLNEYKRCDGRDLTSLRNVSCEVDMFKTLHGSALFQRGQTQVLCTVTFDSLESGIKSDQVITAINGIKDKNFMLHYEFPPYATNEIGKVTGLNRRELGHGALAEKALYPVIPRDFPSLSAIFPRRHNGAHECPGRCSQEYQQCRKERQTPGAY

SEQ ID NO: 1792 - protein, 530 aa, Homo sapiens [sequence omitted]

SEQ ID NO: 1793 - protein, 819 aa, Homo sapiens
MDSEYYSGDQSDDGGATPVQDERDSGSDGEDDVNEQHSGSDTGSVERHSENETSDREDGLPKGHHVTDSENDEPLNLNASDSESEELHRQKDSDSESEERAEPPASDSENEDVNQHGSDSESEETRKLPGSDSENEELLNGHASDSENEDVGKHPASDSEIEELQKSPASDSETEDALKPQISDSESEEPPRHQASDSENEEPPKPRMSDSESEELPKPQVSDSESEEPPRHQASDSENEELPRPRISDSESEDPPRHQASDSENEELPKPRISDSESEDPPRNQASDSENEELPKPRVSDSESEGPQKGPASDSETEDASRHKQKPESDDDSDRENKGEDTEMQNDSFHSDSHMDRKKFHSSDSEEEEHKKQKMDSDEDEKEGEEEKVAKRKAAVLSDSEDEEKASAKKSRVVSDADDSDSDAVSDKSGKREKTIASDSEEEAGKELSDKKNEEKDLFGSDSESGNEEENLIADIFGESGDEEEEEFTGFNQEDLEEEKGETQVKEAEDSDSDDNIKRGKHMDFLSDFEMMLQRKKSMSGKRRRNRDGGTFISDADDDVSAMIVKMNEAAEEDRQLNNQKKPALKKLTLLPAVVMHLKKQDLKETFIDSGVMSAIKEWLSPLPDRSLPALKIREELLKILQELPSVSQETLKHSGIGRAVMYLYKHPKESRSNKDMAGKLINEWSRPIFGLTSNYKGMTREEREQRDLEQMPQRRRMNSTGGQTPRRDLEKVLTGEEKALRPGDPGFCARARVPMPSNKDYVVRPKWNVEMESSRFQATSKKGIGRLDKQMRKFTDIRKKSRSAHAVKISIEGNKMPL

SEQ ID NO: 1794 - protein, 271 aa, Homo sapiens [sequence omitted]

SEQ ID NO: 1795 - protein, 201 aa, Homo sapiens
MLFTSFVEQKKKAGVFEQITKTHGTIIGITSGIVLVLLIISILVQVKQPRKKVMACKTAFNKTGFQEVFDPPHYELFSLRDKEISADLADLSEELDNYQRMRRSSTASRCIHDHHCGSQASSVKQSRTNLSSMELPLRNDFAQPQPMKTFNSTFKKSSYTFKQGHECPEQALEDRVMEEIPCEIYVRGREDSAQASISIDF

SEQ ID NO: 1796 - protein, 737 aa, Homo sapiens
MELGCWTQLGLTFLQLLLISSLPREYTVINEACPGAEWNIMCRECCEYDQIECVCPGKREVVGYTIPCCRNEENECDSCLIHPGCTIFENCKSCRNGSWGGTLDDFYVKGFYCAECRAGWYGGDCMRCGQVLRAPKGQILLESYPLNAHCEWTIHAKPGFVIQLRFVMLSLEFDYMCQYDYVEVRDGDNRDGQIIKRVCGNERPAPIQSIGSSLHVLFHSDGSKNFDGFHAIYEEITACSSSPCFHDGTCVLDKAGPYKCACLAGYTGQRCENLLEAGKSKIKASEDSLSVLEERNCSDPGGPVNGYQKITGGPGLINGRHAKIGTVVSFFCNNSYVLSGNEKRTCQQNGEWSGKQPICIKACREPKISDLVRRRVLPMQVQSRETPLHQLYSAAFSKQKLQSAPTKKPALPFGDLPMGYQHLHTQLQYECISPFYRRLGSSRRTCLRTGKWSGRAPSCIPICGKIENITAPKTQGLRWPWQAAIYRRTSGVHDGSLHKGAWFLVCSGALVNERTVVVAAHCVTDLGKVTMIKTADLKVVLGKFYRDDDRDEKTIQSLQISAIILHPNYDPILLDADIAILKLLDKARISTRVQPICLAASRDLSTSFQESHITVAGWNVLADVRSPGFKNDTLRSGVVSVVDSLLCEEQHEDHGIPVSVTDNMFCASWEPTAPSDICTAETGGIAAVSFPGRASPEPRWHLMGLVSWSYDKTCSHRLSTAFTKVLPFKDWIERNMK

SEQ ID NO: 1797 - protein, 426 aa, Homo sapiens
MSSHYTEDLLPEQCMQDSFQKVILRRYGSCGLEDLHLRKDGENVGECKDQKEIYNGLNQCLSTLPSKIFPYNKCVKVFSKSSNLNRENIRHTTEKLFKCMQCGKVFKSHSGLSYHKIIHTEEKLCICEECGKTFKWFSYLTKHKRIHTGEKPYKCEECGKAFNWCSSLTKHKRIHTGEKPYKCEECGKAFHWCSPFVRHKKIHTGEKPYTCEDCGRAFNRHSHLTKHKTIHTGKKPYKCKECGKAFNHCSLLTIHERTHTGEKPYKCEECGKAFNSSSILTEHKVIHSGEKPYKCEKCDKVFKRFSYLTKHKRIHTGEKPYKCEECGKAFNWSSILTEHKRIHTGEKPYNCEECGKAFNRCSHLLDIRKFILPSNAINVKNVAKLLNGAHILMNIREFKEERNPASIKNVGKLLITAQTLLRKNFY

SEQ ID NO: 1798 - protein, 479 aa, Homo sapiens
MIMHNGDGTYKCKFCGKACPCLSIYLIHERVHTGEKPYKCKQCGKAFSYSTSLQIHERTHTGEKPYECKECGKAFGSPNSLYEHRRTHTGEKPYECKQCGKAFRWFHSFQIHERTHSEEKAYECTKCGKAFKCPSYLCRHEVTHSGKKPCECKQCGKALSYLNFQRHMKMHTRMRPYKCKTVEKPLILPVRFEAMKELTLERNLMNASTVVKPSIVPVPFTIMKGLTLERNPMNVSSVVKPSFLPLPFDIMKGLTLERNRMSVSNVGKPSDLPHTFKCMEGLTLKRNPMNVSSVVKPSFFPLPFDIMKGLTLERNPMSVSNVGKPSHLPHTFKCMKGLTLESNCMNLNNVKKPLDLSETFKFMKRHTLERNPIRNMEKHSTISLPFKYMQQCTEDRMPMNVKSVTKHSYLPRSFEYMQEHTLERNPMNVRNAEKRSIIFLLYVYTKGCTLERNHINVRIVGKHSVCLVPFVDIKGLTLE

SEQ ID NO: 1799 - protein, 911 aa, Homo sapiens
MADGGGPKEAPSLRSSPGPAPRVPRAVGPSGGGGETPRTAALALRFDKPIKQAFYNTGAVLFVCLCCGAAVLVYFILEAFLRPLLWAVLCGTFLHPFKSSLTRLGRHWLQRLHRAHTPIVLAALLLPLCFVDYGVEALGEQALRRRRLLLLLGAGGPLLYGLYCLGSYLGVQVLLVHAATLICRGLDYFSSLWIWTLVVGYVLTVSFKWNASTERYLRAVSIPVWIILLFHLASLAGSWRIPVFLVIVFLMSVGTLYEKQNGKESSGAELPGQVISMAASTLANLAISITGYESSSEDQPSTQPAEAVDRGESAPTLSTSPSPSSPSPTSPSPTLGRRRPEIGTFLRKKKTSDIYFVSLVWAIVVMQIWLNLWIVQLLPVPIAVWILKKLVIHFGVVDFLEKRYHVWWGIIESFLKERQGALAPWPIVGLGKFLLKVDSKLWHWLNKKMIIWLEKMLDKIISIFIIFLLVIGTLLLALLLTAKVHQESVHMIEVTSNLINETLANHPEWANWLPEAQVVQRALNSAANNVYQYGREWITHKLHKILGDKVNNTAVIEKQVLELWDRLYHSWFVKNVTHSGRHKGQKLHVSRQNSWLGDILDWQDIVSFVHENIETFLSILESLWIVMSRNVSLLFTTVTTLLTILFYSGTALLNFVLSLIIFLTTLFYLLSSSDEYYKPVKWVISLTPLSQPGPSSNIIGQSVEEAIRGVFDASLKMAGFYGLYTWLTHTMFGINIVFIPSALAAILGAVPFLGTYWAAVPAVLDLWLTQGLGCKAILLLIFHLLPTYFVDTAIYSDISGGGHPYLTGLAVAGGAYYLGLEGAIIGPILLCILVVASNIYSAMLVSPTNSVPTPNQTPWPAQPQRTFRDISERSEIFSKVDVVSSAVIFLRKFKFDSEFSSAVAFCPSSCA

SEQ ID NO: 1800 - protein, 563 aa, Homo sapiens [sequence omitted]

SEQ ID NO: 1801 - protein, 1029 aa, Homo sapiens
ENLTYRQLLERCVEDPETGLRLLPLKGAEKAEVVETTQVYTEEETRRAFEETQIDIPGGGSHGGSTMSLWEVMQSDLIPEEQRAQLMADFQAGRVTKERMIIIIIEIIEKTEIIRQQGLASYDYVRRRLTAEDLFEARIISLETYNLLREGTRSLREALEAESAWCYLYGTGSVAGVYLPGSRQTLSIYQALKKGLLSAEVARLLLEAQAATGFLLDPVKGERLTVDEAVRKGLVGPELHDRLLSAERAVTGYRDPYTEQTISLFQAMKKELIPTEEALRLLDAQLATGGIVDPRLGFHLPLEVAYQRGYLNKDTHDQLSEPSEVRSYVDPSTDERLSYTQLLRRCRRDDGTGQLLLPLSDARKLTFRGLRKQITMEELVRSQVMDEATALQLREGLTSIEEVTKNLQKFLEGTSCIAGVFVDATKERLSVYQAMKKGIIRPGTAFELLEAQAATGYVIDPIKGLKLTVEEAVRMGIVGPEFKDKLLSAERAVTGYKDPYSGKLISLFQAMKKGLILKDHGIRLLEAQIATGGIIDPEESHRLPVEVAYKRGLFDEEMNEILTDPSDDTKGFFDPNTEENLTYLQLMERCITDPQTGLCLLPLKEKKRERKTSSKSSVRKRRVVIVDPETGKEMSVYEAYRKGLIDHQTYLELSEQECEWEEITISSSDGVVKSMIIDRRSGRQYDIDDAIAKNLIDRSALDQYRAGTLSITEFADMLSGNAGGFRSRSSSVGSSSSYPISPAVSRTQLASWSDPTEETGPVAGILDTETLEKVSITEAMHRNLVDNITGQRLLEAQACTGGIIDPSTGERFPVTDAVNKGLVDKIMVDRINLAQKAFCGFEDPRTKTKMSAAQALKKGWLYYEAGQRFLEVQYLTGGLIEPDTPGRVPLDEALQRGTVDARTAQKLRDVGAYSKYLTCPKTKLKISYKDALDRSMVEEGTGLRLLEAAAQSTKGYYSPYSVSGSGSTAGSRTGSRTGSRAGSRRGSFDATGSGFSMTFSSSSYSSSGYGRRYASGSSASLGGPESAVA

SEQ ID NO: 1802 - protein, 580 aa, Homo sapiens
RCLNPALGNLTALTYLNLSRNQLSLLPPYICQLPLRVLIVSNNKLGALPPDIGTLGSLRQLDVSSNELQSLPSELCGLSSLRDLNVRRNQLSTLPEELGDLPLVRLDFSCNRVSRIPVSFCRLRHLQVILLDSNPLQSPPAQVCLKGKLHIFKYLSTEAGQRGSALGDLAPSRPPSFSPCPAEDLFPGHRYDGGLDSGFHSVDSGSKRWSGNESTDEFSELSFRISELAREPRGPRERKEDGSADGDPVQIDFIDSHVPGEDEERGTVEEQRPPELSPGAGDRERAPSSRREEPAGEERRRPDTLQLWQERERRQQQQSGAWGAPRKDSLLKPGLRAVVGGAAAVSTQAMHNGSPKSSASQAGAAAGQGAPAPAPASQEPLPIAGPATAPAPRPLGSIQRPNSFLFRSSSQSGSGPSSPDSVLRPRRYPQVPDEKDLMTQLRQVLESRLQRPLPEDLAEALASGVILCQLANQLRPRSVPFIHVPSPAVPKLSALKARKNVESFLEACRKMGVPEADLCSPSDLLQGTARGLRTALEAMKRVGGKALPPLWPPSGLGGFVVFYVVLMLLLYVTYTRLLGS

SEQ ID NO: 1803 - protein, 554 aa, Homo sapiens
WEWSGGSVVMWLDRRGWLRVLGHWRYDLRRPSFTRTWSGDKGPMAETVSTQVGTEGGLRASHQQNGDAGGDAKVELSPGPPKPAGREVEPAPVGGEHPSAAAPGPGKHKKRRGATRERVVPPPKKRRTGVSFGDEHFAETSYYFEGGLRKVRPYYFDFRTYCKGRWVGHSLLHVFSTEFRAQPLAYYEAAVRAGRLQLNEKPVQDLNIVLKDNDFLRNTVHRHEPPVTAEPIRLLAENEDVVVVDKPSSIPVHPCGRFRHNTVIFILGKEHQLKELHPLHRLDRLTSGVLMFAKTAAVSERIHEQVRDRQLEKEYVCRVEGEFPTEEVTCKEPILVVSYKVGVCRVDPRGKPCETVFQRLSYNGQSSVVRCRPLTGRTHQIRVHLQFLGHPILNDPIYNSVAWGPSRGRGGYIPKTNEELLRDLVAEHQAKQSLDVLDLCEGDLSPGLTDSTAPSSELGKDDLEELAAAAQKMEEVAEAAPQELDTIALASEKAVETDVMNQETDPLCAECRLVRQDPLPQDLVMFLHALRYKGPGFEYFSPMPAWAQDDWQKD

SEQ ID NO: 1804 - protein, 432 aa, Homo sapiens
GTRPVAAQAGKLLRALALRPRFLAAGSQAVQLTSRRWLNLQEYQSKKLMSDNGVRVQRFFVADTANEALEAAKRLNAKEIVLKAQILAGGRGKGVFNSGLKGGVHLTKDPNVVGQLAKQMIGYNLATKQTPKEGVKVNKVMVAEALDISRETYLAILMDRSCNGPVLVGSPQGGVDIEEVAASNPELIFKEQIDIFEGIKDSQAQRMAENLGFVGPLKSQAADQITKLYNLFLKIDATQVEVNPFGETPEGQVVCFDAKINFDDNAEFRQKDIFAMDDKSENEPIENEAAKYDLKYIGLDGNIACFVNGAGLAMATCDIIFLNGGKPANFLDLGGGVKEAQVYQAFKLLTADPKVEAILVNIFGGIVNCAIIANGITKACRELELKVPLVVRLEGTNVQEAQKILNNSGLPITSAIDLEDAAKKAVASVAKK

SEQ ID NO: 1805 - protein, 750 aa, Homo sapiens
ARGHEEHHAAKTLGIGKAIAVLTSGGDAQGMNAAVRAVVRVGIFTGARVFFVHEGYQGLVDGGDHIKEATWESVSMMLQLGGTVIGSARCKDFREREGRLRAAYNLVKRGITNLCVIGGDGSLTGADTFRSEWSDLLSDLQKAGKITDEEATKSSYLNIVGLVGSIDNDFCGTDMTIGTDSALHRIMEIVDAITTTAQSHQRTFVLEVMGRHCGYLALVTSLSCGADWVFIPECPPDDDWEEHLCRRLSETRTRGSRLNIIIVAEGAIDKNGKPITSEDIKNGSRMGVEAVMALLEGTPDTPACVVSLSGNQAVRLPLMECVQVTKDVTKAMDEKKFDEALKLRGRSFMNNWEVYKLLAHVRPPVSKSGSHTVAVMNVGAPAAGMNAAVRSTVRIGLIQGNRVLVVHDGFEGLAKGQIEEAGWSYVGGWTGQGGSKLGTKRTLPKKSFEQISANITKFNIQGLVIIGGFEAYTGGLELMEGRKQFDELCIPFVVIPATVSNNVPGSDFSVGADTALNTICTTCDRIKQSAAGTKRRVFIIETMGGYCGYLATMAGLAAGADAAYIFEEPFTIRDLQANVEHLVQKMKTTVKRGLVLRNEKCNENYTTDFIFNLYSEEGKGIFDSRKNVLGHMQQGGSPTPFDRNFATKMGAKAMNWMSGKIKESYRNGRIFANTPDSGCVLGMRKRALVFQPVAELKDQTDFEHRIPKEQWWLKLRPILKILAKYEIDLDTSDHAHLEHITRKRSGEAAV

SEQ ID NO: 1806 - protein, 586 aa, Homo sapiens [sequence omitted]

SEQ ID NO: 1807 - protein, 468 aa, Homo sapiens
MGTVHARSLEPLPSSGPDFGGLGEEAEFVEVEPEAKQEILENKDVVVQHVHFDGLGRTKDDIIICEIGDVFKAKNLIEVMRKSHEAREKLLRLGIFRQVDVLIDTCQGDDALPNGLDVTFEVTELRRLTGSYNTMVGNNEGSMVLGLKLPNLLGRAEKVTFQFSYGTKETSYGLSFFKPRPGNFERNFSVNLYKVTGQFPWSSLRETDRGMSAEYSFPIWKTSHTVKWEGVWRELGCLSRTASFAVRKESGHSLKSSLSHAMVIDSRNSSILPRRGALLKVNQELAGYTGGDVSFIKEDFELQLNKQLIFDSVFSASFWGGMLVPIGDKPSSIADRFYLGGPTSVRGFSMHSIGPQSEGDYLGGEAYWAGLHLYTPLPFRPGQGGFGELFRTHFFLNAGNLCNLNYGEGPKAHIRKLAECIRWSYGAGIVLRLGNIARLELNYCVPMGVQTGDRICDGVQFGAGIRFL

SEQ ID NO: 1808 - protein, 568 aa, Homo sapiens
VDLSSHLAKVTAEVVLAHLGGGSTSRATSFLLALEPELEARLAHLGVQVKGEDEEENNLEVRETKIKGKSGRFFTVKLPVALDPGAKISVIVETVYTHVLHPYPTQITQSEKQFVVFEGNHYFYSPYPTKTQTMRVKLASRNVESYTKLGNPTRSEDLLDYGPFRDVPAYSQDTFKVHYENNSPFLTITSMTRVIEVSHWGNIAVEENVDLKHTGAVLKGPFSRYDYQRQPDSGISSIRSFKTILPAAAQDVYYRDEIGNVSTSHLLILDDSVEMEIRPRFPLFGGWKTHYIVGYNLPSYEYLYNLGDQYALKMRFVDHVFDEQVIDSLTVKIILPEGAKNIEIDSPYEISRAPDELHYTYLDTFGRPVIVAYKKNLVEQHIQDIVVHYTFNKVLMLQEPLLVVAAFYILFFTVIIYVRLDFSITKDPAAEARMKVACITEQVLTLVNKRIGLYRHFDETVNRYKQSRDISTLNSGKKSLETEHKALTSEIALLQSRLKTEGSDLCDRVSEMQKLDAQVKELVLKSAVEAERLVAGKLKKDTYIENEKLISGKRQELVTKIDHILDAL

SEQ ID NO: 1809 - protein, 553 aa, Homo sapiens
SLQEQVAMQRQVLKEMEQQLQSSHQLTARLRAQIAMYESELERAHGQMLEEMQSLEEDKNRAIEEAFARAQVEMKAVHENLAGVRTNLLTLQPALRTLTNDYNGLKRQVRGFPLLLQEALRSVKAEIGQAIEEVNSNNQELLRKYRRELQLRKKCHNELVRLKGNIRVIARVRPVTKEDGEGPEATNAVTFDADDDSIIHLLHKGKPVSFELDKVFSPQASQQDVFQEVQALVTSCIDGFNVCIFAYGQTGAGKTYTMEGTAENPGINQRALQLLFSEVQEKASDWEYTITVSAAEIYNEVLRDLLGKEPQEKLEIRLCPDGSGQLYVPGLTEFQVQSVDDINKVFEFGHTNRTTEFTNLNEHSSRSHALLIVTVRGVDCSTGLRTTGKLNLVDLAGSERVGKSGAEGSRLREAQHINKSLSALGDVIAALRSRQGHVPFRNSKLTYLLQDSLSGDSKTLMVVQVSPVEKNTSETLYSLKFAERVRSVELGPGLRRAELGSWSSQEHLEWEPACQTPQPSARAHSAPSSGTSSRPGSIRRKLQPSGKSRPLPV

SEQ ID NO: 1810 - protein, 1449 aa, Homo sapiens
GRSRSRTSGRVGLAARGGGGAATAVAAAAKMAEGLERVRISASELRGILATLAPQAGSRENMKELKEARPRKDNRRPDLEIYKPGLSRLRNKPKIKEPPGSEEFKDEIVNDRDCSAVENGTQPVKDVCKELNNQEQNGPIDPENNRGQESFPRTAGQEDRSLKIIKRTKKPDLQIYQPGRRLQTVSKESASRVEEEEVLNQVEQLRVEEDECRGNVAKEEVANKPDRAEIEKSPGGGRVGAAKGEKGKRMGKGEGVRETHDDPARGRPGSAKRYSRSDKRRNRYRTRSTSSAGSNNSAEGAGLTDNGCRRRRQDRTKERPPLKKQVSVSSTDSLDEDRIDEPDGLGPRRSSERKRHLERNWSGRGEGEQKTSAKEYRGTLRVTFDAEAMNKESPMVRSARDDMDRGKPDKGLSSGGKGSEKQESKNPKQELRGRGRGILILPAHTTLSVNSAGSPESAPLGPRLLFGSGSKGSRSWGRGGTTRRLWDPNNPDQKPALKTQTPQLHFLDTDDEVSPTSWGDSRQAQASYYKFQNSDNPYYYPRTPGPASQYPYTGYNPLQYPVGPTNGVYPGPYYPGYPTPSGQYVCSPLPTSTMSPEEVEQHMRNLQQQELHRLLRVADNQELQLSNLLSRDRISPEGLEKMAQLRAELLQLYERCILLDIEFSDNQNVDQILWKNAFYQVIEKFRQLVKDPNVENPEQIRNRLLELLDEGSDFFDSLLQKLQVTYKFKLEDYMDGLAIRSKPLRKTVKYALISAQRCMICQGDIARYREQASDTANYGKARSWYLKAQHIAPKNGRPYNQLALLAVYTRRKLDAVYYYMRSLAASNPILTAKESLMSLFEETKRKAEQMEKKQHEEFDLSPDQWRKGKKSTFRHVGDDTTRLEIWIHPSHPRSSQGTESGKDSEQENGLGSLSPSDLNKRFILSFLHAHGKLFTRIGMETFPAVAEKVLKEFQVLLQHSPSPIGSTRMLQLMTINMFAVHNSQLKDCFSEECRSVIQEQAAALGLAMFSLLVRRCTCLLKESAKAQLSSPEDQDDQDDIKVSSFVPDLKELLPSVKVWSDWMLGYPDTWNPPPTSLDLPSHVAVDVWSTLADFCNILTAVNQSEVPLYKDPDDDLTLLILEEDRLLSGFVPLLAAPQDPCYVEKTSDKVIAADCKRVTVLKYFLEALCGQEEPLLAFKGGKYVSVAPVPDTMGKEMGSQEGTRLEDEEEDVVIEDFEEDSEAEGSGGEDDIRELRAKKLALARKIAEQQRRQEKIQAVLEDHSQMRQMELEIRPLFLVPDTNGFIDHLASLARLLESRKYILVVPLIVINELDGLAKGQETDHRAGGYARVVQEKARKSIEFLEQRFESRDSCLRALTSRGNELESIAFRSEDITGQLGNNDDLILSCCLHYCKDKAKDFMPASKEEPIRLLREVVLLTDDRNLRVKALTRNVPVRDIPAFLTWAQVG

SEQ ID NO: 1811 - protein, 896 aa, Homo sapiens
FAVVKLGRHRITKTEVAIKIIDKSQLDAVNLEKIYREVQIMKMLDHPHIIKLYQVMETKSMLYLVTEYAKNGEIFDYLANHGRLNESEARRKFWQILSAVDYCHGRKIVHRDLKAENLLLDNNMNIKIADFGFGNFFKSGELLATWCGSPPYAAPEVFEGQQYEGPQLDIWSMGVVLYVLVCGALPFDGPTLPILRQRVLEGRFRIPYFMSEDCEHLIRRMLVLDPSKRLTIAQIKEHKWMLIEVPVQRPVLYPQEQENEPSIGEFNEQVLRLMHSLGIDQQKTIESLQNKSYNHFAAIYFLLVERLKSHRSSFPVEQRLDGRQRRPSTIAEQTVAKAQTVGLPVTMHSPNMRLLRSALLPQASNVEAFSFPASGCQAEAAFMEEECVDTPKVNGCLLDPVPPVLVRKGCQSLPSNMMETSIDEGLETEGEAEEDPAHAFEAFQSTRSGQRRHTLSEVTNQLVVMPGAGKIFSMNDSPSLDSVDSEYDMGSVQRDLNFLEDNPSLKDIMLANQPSPRMTSPFISLRPTNPAMQALSSQKREVHNRSPVSFREGRRASDTSLTQGIVAFRQHLQNLARTKGILELNKVQLLYEQIGPEADPNLAPAAPQLQDLASSCPQEEVSQQQESVSTLPASVHPQLSPRQSLETQYLQHRLQKPSLLSKAQNTCQLYCKEPPRSLEQQLQEHRLQQKRLFLQKQSQLQAYFNQMQIAESSYPQPSQQLPLPRQETPPPSQQAPPFSLTQPLSPVLEPSSEQMQYSPFLSQYQEMQLQPLPSTSGPRAAPPLPTQLQQQQPPPPPPPPPPRQPGAAPAPLQFSYQTCELPSAASPAPDYPTPCQYPVDGAQQSDLTGPDCPRSPGLQEAPSSYDPLALSELPGLFDCEMLDAVDPQHNGYVLVN

SEQ ID NO: 1812 - protein, 620 aa, Homo sapiens
TCPPLLALVITFSGRVRLRTPKCSIPKESLGNQAPSILSQAPQPSPREPVRNDPTMAKLWFKFQRYFRRKPVRFFTFLALYLTAGSLVFLHSGFVGQPAVSGNQANPAAAGGPAEGAELSFLGDMHLGRGFRDTGEASSIARRYGPWFKGKDGNERAKLGDYGGAWSRALKGRVVREKEEERAKYIGCYLDDTQSRALRGVSFFDYKKMTIFRCQDNCAERGYLYGGLEFGAECYCGHKIQATNVSEAECDMECKGERGSVCGGANRLSVYRLQLAQESARRYGSAVFRGCFRRPDNLSLALPVTAAMLNMSVDKCVDFCTEKEYPLAALAGTACHCGFPTTRFPLHDREDEQLCAQKCSAEEFESCGTPSYFIVYQTQVQDNRCMDRRFLPGKSKQLIALASFPGAGNTWARHLIELATGFYTGSYYFDGSLYNKGFKGERDHWRSGRTICIKTHESGQKEIEAFDAAILLIRNPYKALMAEFNRKYGGHIGFAAHAHWKGKEWPEFVRNYAPWWATHTLDWLKFGKKVLVVHFEDLKQDLFVQLGRMVSLLGVAVREDRLLCVESQKDGNFKRSGLRKLEYDPYTADMQKTISAYIKMVDAALKGRNLTGVPDDYYPR

SEQ ID NO: 1813 - protein, 1727 aa, Homo sapiens
ALLHFMREKEQEREEQLMEDKKRKKEDKKKKEATQKVTEQKTKVPEVTKPSLSQPTAASPIGSSPSPPVNGGNNAKRVAVPNGQPPSAARYMPREVPPRFRCQQDHKVLLKRGQPPPPSCMLLGGGAGPPPCTAPGANPNNAQVTGALLQSESGTAPDSTLGGAAASNYANSTWGSGASSNNGTSPNPIHIWDKVIVDGSDMEEWPCIASKDTESSSENTTDNNSASNPGSEKSTLPGSTTSNKGKGSQCQSASSGNECNLGVWKSDPKAKSVQSSNSTTENNNGLGNWRNVSGQDRIGPGSGFSNFNPNSNPSAWPALVQEGTSRKGALETDNSNSSAQVSTVGQTSREQQSKMENAGVNFVVSGREQAQIHNTDGPKNGNTNSLNLSSPNPMENKGMPFGMGLGNTSRSTDAPSQSTGDRKTGSVGSWGAARGPSGTDTVSGQSNSGNNGNNGKEREDSWKGASVQKSTGSKNDSWDNNNRSTGGSWNFGPQDSNDNKWGEGNKMTSGVSQGEWKQPTGSDELKIGEWSGPNQPNSSTGAWDNQKGHPLPENQGNAQAPCWGRSSSSTGSEVGGQSTGSNHKAGSSDSHNSGRRSYRPTHPDCQAVLQTLLSRTDLDPRVLSNTGWGQTQIKQDTVWDIEEVPRPEGKSDKGTEGWESAATQTKNSGGWGDAPSQSNQMKSGWGELSASTEWKDPKNTGGWNDYKNNNSSNWGGGRPDEKTPSSWNENPSKDQGWGGGRQPNQGWSSGKNGWGEEVDQTKNSNWESSASKPVSGWGEGGQNEIGTWGNGGNASLASKGGWEDCKRSPAWNETGRQPNSWNKQHQQQQPPQQPPPPQPEASGSWGGPPPPPPGNVRPSNSSWSSGPQPATPKDEEPSGWEEPSPQSISRKMDIDDGTSAWGDPNSYNYKNVNLWDKNSQGGPAPREPNLPTPMTSKSASDSKSMQDGWGESDGPVTGARHPSWEEEEDGGVWNTTGSQGSASSHNSASWGQGGKKQMKCSLKGGNNDSWMNPLAKQFSNMGLLSQTEDNPSSKMDLSVGSLSDKKFDVDKRAMNLGDFNDIMRKDRSGFRPPNSKDMGTTDSGPYFEKGGSHGLFGNSTAQSRGLHTPVQPLNSSPSLRAQVPPQFISPQVSASMLKQFPNSGLSPGLFNVGPQLSPQQIAMLSQLPQIPQFQLACQLLLQQQQQQQLLQNQRKISQAVRQQQEQQLARMVSALQQQQQQQRQPGMKHSPSHPVGPKPHLDNMVPNALNVGLPDLQTKGPIPGYGSGFSSGGMDYGMVGGKEAGTESRFKQWTSMMEGLPSVATQEANMHKNGAIVAPGKTRGGSPYNQFDIIPGDTLGGHTGPAGDSWLPAKSPPTNKIGSKSSNASWPPEFQPGVPWKGIQNIDPESDPYVTPGSVLGGTATSPIVDTDHQLLRDNTTGSNSSLNTSLPSPGAWPYSASDNSFTNVHSTSAKFPDYKSTWSPDPIGHNPTHLSNKMWKNHISSRNTTPLPRPPPGLTNPKPSSPWSSTAPRSVRGWGTQDSRLASASTWSDGGSVRPSYWLVLHNLTPQIDGSTLRTICMQHGPLLTFHLNLTQGTALIRYSTKQEAAKAQTALHMCVLGNTTILAEFATDDEVSRFLAQAQPPTPAATPSAPAAGWQSLETGQNQSDPVGPALNLFGGSTGLGQWSSSAGGSSGADLAGASLWGPPNYSSSLWGVPTVEDPHRMGSPAPLLPGDLLGGGSDSI

SEQ ID NO: 1814 - protein, 346 aa, Homo sapiens
MDWVMKHNGPNDASDGTVRLRGLPFGCSKEEIVQFFQGLEIVPNGITLTMDYQGRSTGEAFVQFASKEIAENALGKHKERIGHRYIEIFRSSRSEIKGFYDPPRRLLGQRPGPYDRPIGGRGGYYGAGRGSMYDRMRRGGDGYDGGYGGFDDYGGYNNYGYGNDGFDDRMRDGRGMGGHGYGGAGDASSGFHGGHFVHMRGLPFRATENDIANFFSPLNPIRVHIDIGADGRATGEADVEFVTHEDAVAAMSKDKNNMQHRYIELFLNSTPGGGSGMGGSGMGGYGRDGMDNQGGYGSVGRMGMGNNYSGGYGTPDGLGGYGRGGGGSGGYYGQGGMSGGGWRGMY

SEQ ID NO: 1815 - protein, 805 aa, Homo sapiens
MANVSKKVSWSGRDRDDEEAAPLLRRTARPGGGTPLLNGAGPGAARQSPRSALFRVGHMSSVELDDELLDPDMDPPHPFPKEIPHNEKLLSLKYESLDYDNSENQLFLEEERRINHTAFRTVEIKRWVICALIGILTGLVACFIDIVVENLAGLKYRVIKGNIDKFTEKGGLSFSLLLWATLNAAFVLVGSVIVAFIEPVAAGSGIPQIKCFLNGVKIPHVVRLKTLVIKVSGVILSVVGGLAVGKEGPMIHSGSVIAAGISQGRSTSLKRDFKIFEYFRRDTEKRDFVSAGAAAGVSAAFGAPVGGVLFSLEEGASFWNQFLTWRIFFASMISTFTLNFVLSIYHGNMWDLSSPGLINFGRFDSEKMAYTIHEIPVFIAMGVVGGVLGAVFNALNYWLTMFRIRYIHRPCLQVIEAVLVAAVTATVAFVLIYSSRDCQPLQGGSMSYPLQLFCADGEYNSMAAAFFNTPEKSVVSLFHDPPGSYNPLTLGLFTLVYFFLACWTYGLTVSAGVFIPSLLIGAAWGRLFGISLSYLTGAAIWADPGKYALMGAAAQLGGIVRMTLSLTVIMMEATSNVTYGFPIMLVLMTAKIVGDVFIEGLYDMHIQLQSVPFLHWEAPVTSHSLTAREVMSTPVTCLRRREKVGVIVDVLSDTASNHNGFPVVEHADDTQPARLQGLILRSQLIVLLKHKVFVERSNLGLVQRRLRLKDFRDAYPRFPPIQSIHVSQDERECTMDLSEFMNPSPYTVPQEASLPRVFKLFRALGLRHLVVVDNRNQVVGLVTRKDLARYRLGKRGLEELSLAQT

SEQ ID NO: 1816 - protein, 213 aa, Homo sapiens
MAVLSAPGLRGFRILGLRSSVGPAVQARGVHQSVATDGPSSTQPALPKARAVAPKPSSRGEYVVAKLDDLVNWARRSSLWPMTFGLACCAVEMMHMAAPRYDMDRFGVVFRASPRQSDVMIVAGTLTNKMAPALRKVYDQMPEPRYVVSMGSCANGGGYYHYSYSVVRGCDRIVPVDIYIPGCPPTAEALLYGILQLQRKIKRERRLQIWYRR

SEQ ID NO: 1817 - protein, 542 aa, Homo sapiens
MATATIALQVNGQQGGGSEPAAAAAVVAAGDKWKPPQGTDSIKMENGQSTAAKLGLPPLTPEQQEALQKAKKYAMEQSIKSVLVKQTIAHQQQQLTNLQMAAQRQGALAIMCRVYVGSIYYELGEDTIRQAFAPFGPIKSIDMSWDSVTMKHKGFAFVEYEVPEAAQLALEQMNSVMLGGRNIKVGRPSNIGQAQPIIDQLAEEARAFNRIYVASVHQDLSDDDIKSVFEAFGKIKSCTLARDPTTGKHKGYGFIEYEKAQSSQDAVSSMNLFDLGGQYLRVGKAVTPPMPLLTPATPGGLPPAAAVAAAAATAKITAQEAVAGAAVLGTLGTPGLVSPALTLAQPLGTLPQAVMAAQAPGVITGVTPARPPIPVTIPSVGVVNPILASPPTLGLLEPKKEKEEEELFPESERPEMLSEQEHMSISGSSARHMVMQKLLRKQESTVMVLRNMVDPKDIDDDLEGEVTEECGKFGAVNRVIIYQEKQGEEEDAEIIVKIFVEFSIASETHKAIQALNGRWFAGRKVVAEVYDQERFDNSDLSA

SEQ ID NO: 1818 - protein, 1240 aa, Homo sapiens
MWPSQLLIFMMLLAPIIHAFSRAPIPMAVVRRELSCESYPIELRCPGTDVIMIESANYGRTDDKICDSDPAQMENIRCYLPDAYKIMSQRCNNRTQCAVVAGPDVFPDPCPGTYKYLEVQYECVPYKVEQKVFLCPGLLKGVYQSEHLFESDHQSGAWCKDPLQASDKIYYMPWTPYRTDTLTEYSSKDDFIAGRPTTTYKLPHRVDGTGFVVYDGALFFNKERTRNIVKFDLRTRIKSGEAIIANANYHDTSPYRWGGKSDIDLAVDENGLWVIYATEQNNGKIVISQLNPYTLRIEGTWDTAYDKRSASNAFMICGILYVVKSVYEDDDNEATGNKIDYIYNTDQSKDSLVDVPFPNSYQYIAAVDYNPRDNLLYVWNNYHVVKYSLDFGPLDSRSGQAHHGQVSYISPPIHLDSELERPSVKDISTTGPLGMGSTTTSTTLRTTTLSPGRSTTPSVSGRRNRSTSTPSPAVEVLDDMTTHLPSASSQIPALEESCEAVEAREIMWFKTRQGQIAKQPCPAGTIGVSTYLCLAPDGIWDPQGPDLSNCSSPWVNHITQKLKSGETAANIARELAEQTRNHLNAGDITYSVRAMDQLVGLLDVQLRNLTPGGKDSAARSLNKLQKRERSCRAYVQAMVETVNNLLQPQALNAWRDLTTSDQLRAATMLLHTVEESAFVLADNLLKTDIVRENTDNIKLEVARLSTEGNLEDLKFPENMGHGSTIQLSANTLKQNGRNGEIRVAFVLYNNLGPYLSTENASMKLGTEALSTNHSVIVNSPVITAAINKEFSNKVYLADPVVFTVKHIKQSEENFNPNCSFWSYSKRTMTGYWSTQGCRLLTTNKTHTTCSCNHLTNFAVLMAHVEVKHSDAVHDLLLDVITWVGILLSLVCLLICIFTFCFFRGLQSDRNTIHKNLCISLFVAELLFLIGINRTDQPIACAVFAALLHFFFLAAFTWMFLEGVQLYIMLVEVFESEHSRRKYFYLVGYGMPALIVAVSAAVDYRSYGTDKVCWLRLDTYFIWSFIGPATLIIMLNVIFLGIALYKMFHHTAILKPESGCLDNINYEDNRPFIKSWVIGAIALLCLLGLTWAFGLMYINESTVIMAYLFTIFNSLQGMFIFIFHCVLQKKVRKEYGKCLRTHCCSGKSTESSIGSGKTSGSRTPGRYSTGSQSRIRRMWNDTVRKQSESSFITGDINSSASLNREPYRETSMGVKLNIAYQIGASEQCQGYKCHGYSTTEW

SEQ ID NO: 1819 - protein, 486 aa, Homo sapiens
MISPSPSQEELQTTLEETDQSTQEPFTTKIPRTTELAKTTQAPHRFYTTVRPRTSDKPHIRPVLNRTTTRPTRPKPSGMPSGNGVGTGVKQAPRPSGADRNVSVDSTHPTKKPGTRRPPLPPRPTHPRRKPLPPNNVTGKPGSAGIISSGPITTPPLRSTPRPTGTPLERIETDIKQPTVPASGEELENITDFSSSPTRETDPLGKPRFKGPHVRYIQKPDNSPCSITDSVKRFPKEEATEGNATSPPQNPPTNLTVVTVEGCPSFVILDWEKPLNDTVTEYEVISRENGSFSGKNKSIQMTNQTFSTVENLKPNTSYEFQVKPKNPLGEGPVSNTVAFSTESADPRVSEPVSAGRDAIWTERPFNSDSYSECKGKQYVKRTWYKKFVGVQLCNSLRYKIYLSDSLTGKFYNIGDQRGHGEDHCQFVDSFLDGRTGQQLTSDQLPIKEGYFRAVRQEPVQFGEIGGHTQINYVQWYECGTTIPGKW

SEQ ID NO: 1820 - protein, 507 aa, Homo sapiens
MCDIEEATNQLLDVNLHENQKSVQVTESDLGSESELLVTIGATVPTGFEQTAADEVREKLGSSCKISRDRGKIYFVISVESLAQVHCLRSVDNLFVVVQEFQDYQFKQTKEEVLKDFEDLAGKLPWSNPLKVWKINASFKKKKAKRKKINQNSSKEKINNGQEVKIDQRNVKKEFTSHALDSHILDYYENPAIKEDVSTLIGDDLASCKDETDESSKEETEPQVLKFRVTCNRAGEKHCFTSNEAARDFGGAVQDYFKWKADMTNFDVEVLLNIHDNEVIVGIALTEESLHRRNITHFGPTTLRSTLAYGMLRLCDPLPYDIIVDPMCGTGAIPIEGATEWSDCFHIAGDNNPLAVNRAANNIASLLTKSQIKEGKPSWGLPIDAVQWDICNLPLRTGSVDIIVTDLPFGKRMGSKKRNWNLYPACLREMSRVCTPTTGRAVLLTQDTKCFTKALSGMQHVWRKVDTVWVNVGGLRAAVYVLIRTPQAFVHPSEQDGERGTLWQCKE

SEQ ID NO: 1821 - protein, 205 aa, Homo sapiens
MSKKKGLSAEEKRTRMMEIFSETKDVFQLKDLEKIAPKEKGITAMSVKEVLQSLVDDGMVDCERIGTSNYYWAFPSKALHARKHKLEVLESQLSEGSQKHASLQKSIEKAKIGRCETEERTRLAKELSSLRDQREQLKAEVEKYKDCDPQVVEEIRQANKVAKEAANRWTDNIFAIKSWAKRKFGFEENKIDRTFGIPEDFDYID

SEQ ID NO: 1822 - protein, 893 aa, Homo sapiens
MEKDDPPQLVTPTSVKAIILRIEAAQLTRAQEDISTQLSDILDNVNCVINRFQEELGYDLKENAKSQQRDPKGKKRFILLEKIASFSKDAMMKEKHLYDILRWLGDWGDTLTYEIGPRKSEEEAAALDEWIEVTEKVLPLSLIATKRGIESLTALCSTLIEGQKKRSQVSKRTFWQGWQGRSPQTSPSHPQPLSPEQMLQDQHTMNTKASEVTSMLQELLDSTMFSKGEVRAIRYMATVVENLNKALILQHKENRSLETKYRHLQMQATKELSSQRLHFQQFMEVLESRRDALLKQVEILGGRYHDLLLMKQALEFQLKKAQNATGQAEDLAEVSVDSPGPSERETLPRKETVMEESQQEPMKEEQLFSPLPPSPMAMIRDSGAIAAGHQPLSTMTVRSRVADVFGSKDTESLEPVLLPLVDRRFPKKWERPVAESLGHKDKDQEDYFQKGGLQIKFHCSKQLSLESSRQVTSESQEEPWEEEFGREMRRQLWLEEEEMWQQRQKKWALLEQEHQEKLRQWNLEDLAREQQRRWVQLEKEQESPRREPEQLGEDVERRIFTPTSRWRDLEKAELSLVPAPSRTQSAHQSRRPHLPMSPSTQQPALGKQRPMSSVEFTYRPRTRRVPTKPKKSASFPVTGTSIRRLTWPSLQISPANIKKKVYHMDMEAQRKNLQLLSEESELRLPHYLRSKALELTTTTMELGALRLQYLCHKYIFYRRLQSLRQEAINHVQIMKETEASYKAQNLYIFLENIDRLQSLRLQAWTDKQKGLEEKHRECLSSMVTMFPKLQLEWNVHLNIPEVTSPKPKKCKLPAASPRHIRPSGPTYKQPFLSRHRACVPLQMARQQGKQMEAVWKTEVASSSYAIEKKTPASLPRDQLRGHPDIPRLLTLDV

SEQ ID NO: 1823 - protein, 564 aa, Homo sapiens
MATAERRALGIGFQWLSLATLVLICAGQGGRREDGGPACYGGFDLYFILDKSGSVLHHWNEIYYFVEQLAHKFISPQLRMSFIVFSTRGTTLMKLTEDREQIRQGLEELQKVLPGGDTYMHEGFERASEQIYYENRQGYRTASVIIALTDGELHEDLFFYSEREANRSRDLGAIVYCVGVKDFNETQLARIADSKDHVFPVNDGFQALQGIIHSILKKSCIEILAAEPSTICAGESFQVVVRGNGFRHARNVDRVLCSFKINDSVTLNEKPFSVEDTYLLCPAPILKEVGMKAALQVSMNDGLSFISSSVIITTTHCSDGSILAIALLILFLLLALALLWWFWPLCCTVIIKEVPPPPAEESEEEDDDGLPKKKWPTVDASYYGGRGVGGIKRMEVRWGEKGSTEEGAKLEKAKNARVKMPEQEYEFPEPRNLNNNMRRPSSPRKWYSPIKGKLDALWVLLRKGYDRVSVMRPQPGDTGRCINFTRVKNNQPAKYPLNNAYHTSSPPPAPIYTPPPPAPHCPPPPPSAPTPPIPSPPSTLPPPPQAPPPNRAPPPSRPPPRPSV

SEQ ID NO: 1824 - protein, 823 aa, Homo sapiens
MKLFGFGSRRGQTAQGSIDHVYTGSGYRIRDSELQKIHRAAVKGDAAEVERCLARRSGDLDALDKQHRTALHLACASGHVQVVTLLVNRKCQIDVCDKENRTPLIQAVHCQEEACAVILLEHGANPNFKDIYGNTALHYAVYSESTSLAEKLLSHGAHIEALDKDNNTPLLFAIICKKEKMVEFLLKKKASSHAVDRLRRSALMLAVYYDSPGIVNILLKQNIDVFAQDMCGRDAEDYAISHHLTKIQQQILEHKKKILKKEKSDVGSSDESAVSIFHELRVDSLPASDDKDLNVATKQCVPEKVSEPLPGSSHEKGNRIVNGQGEGPPAKHPSLKPSTEVEDPAVKGAVQRKNVQTLRAEQALPVASEEEQERHERSEKKQPQVKEGNNTNKSEKIQLSENICDSTSSAAAGRLTQQRKIGKTYPQQFPKKLKEEHDRCTLKQENEEKTNVNMLYKKNREELERKEKQYKKEVEAKQLEPTVQSLEMKSKTARNTPNRDFHNHEEMKGLMDENCILKADIAILRQEICTMKNDNLEKENKYLKDIKIVKETNAALEKYIKLNEEMITETAFRYQQELNDLKAENTRLNAELLKEKESKKRLEADIESYQSRLAAAISKHSESVKTERNLKLALERTRDVSVQVEMSSAISKVKAENEFLTEQLSETQIKFNALKDKFCKTRDSLRKKSLALETVQNDLSQTQQQTQEMKEMYQNAEAKVNNSTGKWNCVEERICHLQRENAWLVQQLDDVHQKEDHKEIVTNIQRGFIESEKKDLVLEEKSKKLMNECDHLKESLFQYEREKTGGVVSIKEDKYFQTSRKTI

SEQ ID NO: 1825 - protein, 939 aa, Homo sapiens
MEESEDSQSDSQTRISESQHSLKPNYLSQAKTDFSEQFQLLEDLQLKIAAKLLRSQIPPDVPPPLASGLVLKYPICLQCGRCSGLNCHHKLQTTSGPYLLIYPQLHLVRTPEGHGEVRLHLGFRLRIGKRSQISKYRERDRPVIRRSPISPSQRKAKIYTQASKSPTSTIDLQSGPSQSPAPVQVYIRRGQRSRPDLVEKTKTRAPGHYEFTQVHNLPESDSESTQNEKRAKVRTKKTSDSKYPMKRITKRLRKHRKFYTNSRTTIESPSRELAAHLRRKRIGATQTSTASLKRQPKKPSQPKFMQLLFQSLKRAFQTAHRVIASVGRKPVDGTRPDNLWASKNYYPKQNARDYCLPSSIKRDKRSADKLTPAGSTIKQEDILWGGTVQCRSAQQPRRAYSFQPRPLRLPKPTDSQSGIAFQTASVGQPLRTVQKDSSSRSKKNFYRNETSSQESKNLSTPGTRVQARGRILPGSPVKRTWHRHLKDKLTHKEHNHPSFYRERTPRGPSERTRHNPSWRNHRSPSERSQRSSLERRHHSPSQRSHCSPSRKNHSSPSERSWRSPSQRNHCSPPERSCHSLSERGLHSPSQRSHRGPSQRRHHSPSERSHRSPSERSHRSPSERRHRSPSQRSHRGPSERSHCSPSERRHRSPSQRSHRGPSERRHHSPSKRSHRSPARRSHRSPSERSHHSPSERSHHSPSERRHHSPSERSHCSPSERSHCSPSERRHRSPSERRHHSPSEKSHHSPSERSHHSPSERRRHSPLERSRHSLLERSHRSPSERRSHRSFERSHRRISERSHSPSEKSHLSPLERSRCSPSERRGHSSSGKTCHSPSERSHRSPSGMRQGRTSERSHRSSCERTRHSPSEMRPGRPSGRNHCSPSERSRRSPLKEGLKYSFPGERPSHSLSRDFKNQTTLLGTTHKNPKAGQVWRPEATR

SEQ ID NO: 1826 - protein, 195 aa, Homo sapiens
MENHKSNNKENITIVDISRKINQLPEAERNLLENGSVYVGLNAALCGLIANSLFRRILNVTKARIAAGLPMAGIPFLTTDLTYRCFVSFPLNTGDLDCETCTITRSGLTGLVIGGLYPVFLAIPVNGGLAARYQSALLPHKGNILSYWIRTSKPVFRKMLFPILLQTMFSAYLGSEQYKLLIKALQLSEPGKEIH

SEQ ID NO: 1827 - protein, 828 aa, Homo sapiens
MMEGLKKRTRKAFGIRKKEKDTDSTGSPDRDGIQPSPHEPPYNSKAECAREGGKKVSKKSNGAPNGFYAEIDWERYNSPELDEEGYSIRPEEPGSTKGKHFYSSSESEEEEESHKKFNIKIKPLQSKDILRNAATVDELKASIGNIALSPSPVRKSPRRSPGAIKRNLSSEEVARPRRSTPTPELISKKPPDDTTALAPLFGPPLESAFDEQKTEVLLDQPEIWGSGQPINPSMESPKLTRPFPTGTPPPLPPKNVPATPPRTGSPLTIGPGNDQSATEVKIEKLPSINDLDSIFGPVLSPKSVAVNAEEKWVHFSDTSPEHVTPELTPREKVVSPPATPDNPADSPAPGPLGPPGPTGPPGPPGPPRNVLSPLNLEEVQKKVAEQTFIKDDYLETISSPKDFGLGQRATPPPPPPPTYRTVVSSPGPGSGPGPGTTSGASSPARPATPLVPCRSTTPPPPPPRPPSRPKLPPGKPGVGDVSRPFSPPIHSSSPPPIAPLARAESTSSISSTNSLSAATTPTVENEQPSLVWFDRGKFYLTFEGSSRGPSPLTMGAQDTLPVAAAFTETVNAYFKGADPSKCIVKITGEMVLSFPAGITRHFANNPSPAALTFRVINFSRLEHVLPNPQLLCCDNTQNDANTKEFWVNMPNLMTHLKKVSEQKPQATYYNVDMLKYQVSAQGIQSTPLNLAVNWRCEPSSTDLRIDYKYNTDAMTTAVALNNVQFLVPIDGGVTKLQAVLPPAVWNAEQQRILWKIPDISQKSENGGVGSLLARFQLSEGPSKPSPLVVQFTSEGSTLSGCDIELVGAGYRFSLIKKRFAAGKYLADN

SEQ ID NO: 1828 - protein, 345 aa, Homo sapiens
MLPNTGRLAGCTVFITGASRGIGKAIALKAAKDGANIVIAAKTAQPHPKLLGTIYTAAEEIEAVGGKALPCIVDVRDEQQISAAVEKAIKKFGAYTIAKYGMSMYVLGMAEEFKGEIAVNALWPKTAIHTAAMDMLGGPGIESQCRKVDIIADAAYSIFQKPKSFTGNFVIDENILKEEGIENFDVYAIKPGHPLQPDFFLDEYPEAVSKKVESTGAVPEFKEEKLQLQPKPRSGAVEETFRIVKDSLSDDVVKATQAIYLFELSGEDGGTWFLDLKSKGGNVGYGEPSDQADVVMSMTTDDFVKMFSGKLKPTMAFMSGKLKIKGNMALAIKLEKLMNQMNARL

SEQ ID NO: 1829 - protein, 183 aa, Homo sapiens
MTDQTYCDRLVQDTPFLTGHGRLSEQQVDRIILQLNRYYPQILTNKEAEKFRNPKASLRVRLCDLLSHLQRSGERDCQEFYRALYIHAQPLHSRLPSRHALQNSDCTELDSGSQSGELSNRGPMSFLAGLGLAVGLALLLYCYPPDPKGLPGTRRVLGFSPVIIDRHVSRYLLAFLADDLGGL

SEQ ID NO: 1830 - protein, 183 aa, Homo sapiens; identical to SEQ ID NO: 1829

SEQ ID NO: 1831 - protein, 307 aa, Homo sapiens
MRGCQLLGLRSSWPGDLLSARLLSQEKRAAETHFGFETVSEEEKGGKVYQVFESVAKKYDVMNDMMSLGIHRVWKDLLLWKMHPLPGTQLLDVAGGTGDIAFRFLNYVQSQHQRKQKRQLRAQQNLSWEEITKEYQNEEDSLGGSRVVVCDINKEMLKVGKQKALAQGYRAGLAWVLGDAEELPFDDDKFDIYTIAFGIRNVTHIDQALQEAHRVLKPGGRFLCLEFSQVNNPLISRLYDLYSFQVIPVLGEVIAGDWKSYQYLVESIRRSPSQEEFKDMIEDAGFHKVTYESLTSGIVAIHSGFKL

SEQ ID NO: 1832 - protein, 216 aa, Homo sapiens
MWSIGAGALGAAALALLLANTDVFLSKPQKAALEYLEDIDLKTLEKEPRTFKAKELWEKNGAVIMAVRRPGCFLCREEAADLSSLKSMLDQLGVPLYAVVKEHIRTEVKDFQPYFKGEIFLDEKKKFYGPQRRKMMFMGFIRLGVWYNFFRAWNGGFSGNLEGEGFILGGVFVVGSGKQGILLEHREKEFGDKVNLLSVLEAAKMIKPQTLASEKK

SEQ ID NO: 1833 - protein, 126 aa, Homo sapiens
MAASRYRRFLKLCEEWPVDETKRGRDLGAYLRQRVAQAFREGENTQVAEPEACDQMYESLARLHSNYYKHKYPRPRDTSFSGLSLEEYKLILSTDTLEELKEIDKGMWKKLQEKFAPKGPEEDHKA

SEQ ID NO: 1834 - protein, 235 aa, Homo sapiens
MGSTESSEGRRVSFGVDEEERVRVLQGVRLSENVVNRMKEPSSPPPAPTSSTFGLQDGNLRAPHKESTLPRSGSSGGQQPSGMKEGVKRYEQEHAAIQDKLFQVAKREREAATKHSKASLPTGEGSISHEEQKSVRLARELESREAELRRRDTFYKEQLERIERKNAEMYKLSSEQFHEAASKMESTIKPRRVEPVCSGLQAQILHCYRDRPHEVLLCSDLVKAYQRCVSAAHKG

SEQ ID NO: 1835 - protein, 176 aa, Homo sapiens
MAMSFEWPWQYRFPPFFTLQPNVDTRQKQLAAWCSLVLSFCRLHKQSSMTVMEAQESPLFNNVKLQRKLPVESIQIVLEELRKKGNLEWLDKSKSSFLIMWRRPEEWGKLIYQWVSRSGQNNSVFTLYELTNGEDTEDEEFHGLDEATLLRALQALQQEHKAEIITVSDGRGVKFF

SEQ ID NO: 1836 - protein, 483 aa, Homo sapiens
MEEGGGGVRSLVPGGPVLLVLCGLLEASGGGRALPQLSDDIPFRVNWPGTEFSLPTTGVLYKEDNYVIMTTAHKEKYKCILPLVTSGDEEEEKDYKGPNPRELLEPLFKQSSCSYRIESYWTYEVCHGKHIRQYHEEKETGQKINIHEYYLGNMLAKNLLFEKEREAEEKEKSNEIPTKNIEGQMTPYYPVGMGNGTPCSLKQNRPRSSTVMYICHPESKHEILSVAEVTTCEYEVVILTPLLCSHPKYRFRASPVNDIFCQSLPGSPFKPLTLRQLEQQEEILRVPFRRNKEEDLQSTKEERFPAIHKSIAIGSQPVLTVGTTHISKLTGDQLIKEFLSGSYCFRGGVGWWKYEFCYGKHVHQYHEDKDSGKTSVVVGTWNQEEHIEWAKENTARAYHLQDDGTQTVRMVSHFYGNGDICDITDKPRQVTVKLKCKESDSPHAVTVYMLEPHSCQYILGVESPVICKILDTADENGLLSLPN

SEQ ID NO: 1837 - protein, 178 aa, Homo sapiens
MSSFSRAPQQWATFARIWYLLDGKMQPPGKLAAMASIRLQGLHKPVYHALSDCGDHVVIMNTRHIAFSGNKWEQKVYSSHTGYPGGFRQVTAAQLHLRDPVAIVKLAIYGMLPKNLHRRTMMERLHLFPDEYIPEDILKNLVEELPQPRKIPKRLDEYTQEEIDAFPRLWTPPEDYRL

SEQ ID NO: 1838 - protein, 1140 aa, Homo sapiens
MVISLNSCLSFICLLLCHWIGTASPLNLEDPNVCSHWESYSVTVQESYPHPFDQIYYTSCTDILNWFKCTRHRVSYRTAYRHGEKTMYRRKSQCCPGFYESGEMCVPHCADKCVHGRCIAPNTCQCEPGWGGTNCSSACDGDHWGPHCTSRCQCKNGALCNPITGACHCAAGFRGWRCEDRCEQGTYGNDCHQRCQCQNGATCDHVTGECRCPPGYTGAFCEDLCPPGKHGPQCEQRCPCQNGGVCHHVTGECSCPSGWMGTVCGQPCPEGRFGKNCSQECQCHNGGTCDAATGQCHCSPGYTGERCQDECPVGTYGVLCAETCQCVNGGKCYHVSGACLCEAGFAGERCEARLCPEGLYGIKCDKRCPCHLENTHSCHPMSGECACKPGWSGLYCNETCSPGFYGEACQQICSCQNGADCDSVTGKCTCAPGFKGIDCSTPCPLGTYGINCSSRCGCKNDAVCSPVDGSCTCKAGWHGVDCSIRCPSGTWGFGCNLTCQCLNGGACNTLDGTCTCAPGWRGEKCELPCQDGTYGLNCAERCDCSHADGCHPTTGHCRCLPGWSGVHCDSVCAEGRWGPNCSLPCYCKNGASCSPDDGICECAPGFRGTTCQRICSPGFYGHRCSQTCPQCVHSSGPCHHITGLCDCLPGFTGALCNEVCPSGRFGKNCAGICTCTNNGTCNPIDRSCQCYPGWIGSDCSQPCPPAHWGPNCIHTCNCHNGAFCSAYDGECKCTPGWTGLYCTQRCPLGFYGKDCALICQCQNGADCDHISGQCTCRTGFMGRHCEQKCPSGTYGYGCRQICDCLNNSTCDHITGTCYCSPGWKGARCDQAGVIIVGNLNSLSRTSTALPADSYQIGAIAGIIILVLVVLFLLALFIIYRHKQKGKESSMPAVTYTPAMRVVNADYTISGTLPHSNGGNANSHYFTNPSYHTLTQCATSPHVNNRDRMTVTKSKNNQLFVNLKNVNPGKRGPVGDCTGTLPADWKHGGYLNELGAFGLDRSYMGKSLKDLGKNSEYNSSNCSLSSSENPYATIKDPPVLIPKSSECGYVEMKSPARRDSPYAEINNSTSANRNVYEVEPTVSVVQGVFSNNGRLSQDPYDLPKNSHIPCHYDLLPVRDSSSSPKQEDSGGSSSNSSSSSE

SEQ ID NO: 1839 - protein, 3911 aa, Homo sapiens
MEDEERQKKLEAGKAKIEELSLAFLVRQLAQFRQRKAQSDGQSPSKKQKKKRKTSSSKHDVSAHHDLNIDQSQCNEMYINSSQRVESTVIPESTIMRTLHSGEITSHEQGFSVELESEISTTADDCSSEVNGCSFVMRTGKPTNLLREEEFGVDDSYSEQGAQDSPTHLEMMESELAGKQHEIEELNRELEEMRVTYGTEGLQQLQEFEAAIKQRDGIITQLTANLQQARREKDETMREFLELTEQSQKLQIQFQQLQASETLRNSTHSSTAADLLQAKQQILTHQQQLEEQDHLLEDYQKKKEDFTMQISFLQEKIKVYEMEQDKKVENSNKEEIQEKETIIEELNTKIIEEEKKTLELKDKLTTADKLLGELQEQIVQKNQEIKNMKLELTNSKQKERQSSEEIKQLMGTVEELQKRNHKDSQFETDIVQRMEQETQRKLEQLRAELDEMYGQQIVQMKQELIRQHMAQMEEMKTRHKGEMENALRSYSNITVNEDQIKLMNVAINELNIKLQDTNSQKEKLKEELGLILEEKCALQRQLEDLVEELSFSREQIQRARQTIAEQESKLNEAHKSLSTVEDLKAEIVSASESRKELELKHEAEVTNYKIKLEMLEKEKNAVLDRMAESQEAELERLRTQLLFSHEEELSKLKEDLEIEHRINIEKLKDNLGIHYKQQIDGLQNEMSQKIETMQFEKDNLITKQNQLILEISKLKDLQQSLVNSKSEEMTLQINELQKEIEILRQEEKEKGTLEQEVQELQLKTELLEKQMKEKENDLQEKFAQLEAENSILKDEKKTLEDMLKIHTPVSQEERLIFLDSIKSKSKDSVWEKEIEILIEENEDLKQQCIQLNEEIEKQRNTFSFAEKNFEVNYQELQEEYACLLKVKDDLEDSKNKQELEYKSKLKALNEELHLQRINPTTVKMKSSVFDEDKTFVAETLEMGEVVEKDTTELMEKLEVTKREKLELSQRLSDLSEQLKQKHGEISFLNEEVKSLKQEKEQVSLRCRELEIIINHNRAENVQSCDTQVSSLLDGVVTMTSRGAEGSVSKVNKSFGEESKIMVEDKVSFENMTVGEESKQEQLILDHLPSVTKESSLRATQPSENDKLQKELNVLKSEQNDLRLQMEAQRICLSLVYSTHVDQVREYMENEKDKALCSLKEELIFAQEEKIKELQKIHQLELQTMKTQETGDEGKPLHLLIGKLQKAVSEECSYFLQTLCSVLGEYYTPALKCEVNAEDKENSGDYISENEDPELQDYRYEVQDFQENMHTLLNKVTEEYNKLLVLQTRLSKIWGQQTDGMKLEFGEENLPKEETEFLSIHSQMTNLEDIDVNHKSKLSSLQDLEKTKLEEQVQELESLISSLQQQLKETEQNYEAEIHCLQKRLQAVSESTVPPSLPVDSVVITESDAQRTMYPGSCVKKNIDGTIEFSGEFGVKEETNIVKLLEKQYQEQLEEEVAKVIVSMSIAFAQQTELSRISGGKENTASSKQAHAVCQQEQHYFNEMKLSQDQIGFQTFETVDVKFKEEFKPLSKELGEHGKEILLSNSDPHDIPESKDCVLTISEEMFSKDKTFIVRQSIHDEISVSSMDASRQLMLNEEQLEDMRQELVRQYQEHQQATELLRQAHMRQMERQREDQEQLQEEIKRLNRQLAQRSSIDNENLVSERERVLLEELEALKQLSLAGREKLCCELRNSSTQTQNGNENQGEVEEQTFKEKELDRKPEDVPPEILSNERYALQKANNRLLKILLEVVKTTAAVEETIGRHVLGILDRSSKSQSSASLIWRSEAEASVKSCVHEEHTRVTDESIPSYSGSDMPRNDINMWSKVTEEGTELSQRLVRSGFAGTEIDPENEELMLNISSRLQAAVEKLLEAISETSSQLEHAKVTQTELMRESFRQKQEATESLKCQEELRERLHEESRAREQLAVELSKAEGVIDGYADEKTLFERQIQEKTDIIDRLEQELLCASNRLQELEAEQQQIQEERELLSRQKEAMKAEAGPVEQQLLQETEKLMKEKLEVQCQAEKVRDDLQKQVKALEIDVEEQVSRFIELEQEKNTELMDLRQQNQALEKQLEKMRKFLDEQAIDREHERDVFQQEIQKLEQQLKVVPRFQPISEHQTREVEQLANHLKEKTDKCSELLLSKEQLQRDIQERNEEIEKLEFRVRELEQALLVSADTFQKVEDRKHFGAVEAKPELSLEVQLQAERDAIDRKEKEITNLEEQLEQFREELENKNEEVQQLHMQLEIQKKESTTRLQELEQENKLFKDDMEKLGLAIKESDAMSTQDQHVLFGKFAQIIQEKEVEIDQLNEQVTKLQQQLKITTDNKVIEEKNELIRDLETQIECLMSDQECVKRNREEEIEQLNEVIEKLQQELANIGQKTSMNAHSLSEEADSLKHQLDVVIAEKLALEQQVETANEEMTFMKNVLKETNFKMNQLTQELFSLKRERESVEKIQSIPENSVNVAIDHLSKDKPELEVVLTEDALKSLENQTYFKSFEENGKGSIINLETRLLQLESTVSAKDLELTQCYKQIKDMQEQGQFETEMLQKKIVNLQKIVEEKVAAALVSQIQLEAVQEYAKFCQDNQTISSEPERTNIQNLNQLREDELGSDISALTLRISELESQVVEMHTSLILEKEQVEIAEKNVLEKEKKLLELQKLLEGNEKKQREKEKKRSPQDVEVLKTTTELFHSNEESGFFNELEALRAESVATKAELASYKEKAEKLQEELLVKETNMTSLQKDLSQVRDHLAEAKEKLSILEKEDETEVQESKKACMFEPLPIKLSKSIASQTDGTLKISSSNQTPQILVKNAGIQINLQSECSSEEVTEIISQFTEKIEKMQELHAAEILDMESRHISETETLKREHYVAVQLLKEECGTLKAVIQCLRSKEVFGFYNMCFSTLCDSGSDWGQGIYLTHSQGFDIASEGRGEESESATDSFPKKIKGLLRAVHNEGMQVLSLTESPYSDGEDHSIQQVSEPWLEERKAYINTISSLKDLITKMQLQREAEVYDSSQSHESFSDWRGELLLALQQVFLEERSVLLAAFRTELTALGTTDAVGLLNCLEQRIQEQGVEYQAAMECLQKADRRSLLSEIQALHAQMNGRKITLKREQESEKPSQELLEYNIQQKQSQMLEMQVELSSMKDRATELQEQLSSEKMVVAELKSELAQTKLELETTLKAQHKHLKELEAFRLEVKDKTDEVHLLNDTLASEQKKSRELQWALEKEKAKLGRSEERDKEELEDLKFSLESQKQRNLQLNLLLEQQKQLLNESQQKIESQRMLYDAQLSEEQGRNLELQVLLESEKVRIREMSSTLDRERELHAQLQSSDGTGQSRPPLPSEDLLKELQKQLEEKHSRIVELLNETEKYKLDSLQTRQQMEKDRQVHRKTLQTEQEANTEGQKKMHELQSKVEDLQRQLEEKRQQVYKLDLEGQRLQGIMQEFQKQELEREEKRESRRILYQNLNEPTTWSLTSDRTRNWVLQQKIEGETKESNYAKLIEMNGGGTGCNHELEMIRQKLQCVASKLQVLPQKASERLQFETADDEDFIWVQENIDEIILQLQKLTGQQGEEPSLVSPSTSCGSLTERLLRQNAELTGHISQLTEEKNDLRNMVMKLEEQIRWYRQTGAGRDNSSRFSLNGGANIEAIIASEKEVWNREKLTLQKSLKRAEAEVYKLKAELRNDSLLQTLSPDSEHVTLKRIYGKYLRAESFRKALIYQKKYLLLLLGGFQECEDATLALLARMGGQPAFTDLEVITNRPKGFTRFRSAVRVSIAISRMKFLVRRWHRVTGSVSININRDGFGLNQGAEKTDSFYHSSGGLELYGEPRHTTYRSRSDLDYIRSPLPFQNRYPGTPADFNPGSLACSQLQNYDPDRALTDYITRLEALQRRLGTIQSGSTTQFHAGMRR

SEQ ID NO: 1840 - protein, 820 aa, Homo sapiens
MIPARLHRDYKGLVLLGILLGTLWETGCTQIRYSVPEELEKGSRVGDISRDLGLEPRELAERGVRIIPRGRTQLFALNPRSGSLVTAGRIDREELCMGAIKCQLNLDILMEDKVKIYGVEVEVRDINDNAPYFRESELEIKISENAATEMRFPLPHAWDPDIGKNSLQSYELSPNTHFSLIVQNGADGSKYPELVLKRALDREEKAAHHLVLTASDGGDPVRTGTARIRVMVLDANDNAPAFAQPEYRASVPENLALGTQLLVVNATDPDEGVNAEVRYSFRYVDDKAAQVFKLDCNSGTISTIGELDHEESGFYQMEVQAMDNAGYSARAKVLITVLDVNDNAPEVVLTSLASSVPENSPRGTLIALLNVNDQDSEENGQVICFIQGNLPFKLEKSYGNYYSLVTDIVLDREQVPSYNITVTATDRGTPPLSTETHISLNVADTNDNPPVFPQASYSAYIPENNPRGVSLVSVTAHDPDCEENAQITYSLAENTIQGASLSSYVSINSDTGVLYALSSFDYEQFRDLQVKVMARDNGHPPLSSNVSLSLFVLDQNDNAPEILYPALPTDGSTGVELAPRSAEPGYLVTKVVAVDRDSGQNAWLSYRLLKASEPGLFSVGLHTGEVRTARALLDRDALKQSLVVAVQDHGQPPLSATVTLTVAVADSIPQVLADLGSLESPANSETSDLTLYLVVAVAAVSCVFLAFVILLLALRLRRWHKSRLLQASGGGLTGAPASHFVGVDGVQAFLQTYSHEVSLTTDSRKSHLIFPQPNYADMLVSQESFEKSEPLLLSGDSVFSKDSHGLIEVSLYQIFFLFFF

SEQ ID NO: 1841 - protein, 829 aa, Homo sapiens
MTNCLSFRNGRGLALLCALLGTLCETGSGQIRYSVSEELDKGSFVGNIANDLGLEPRELAERGVRIVSRGRTQLFSLNPQSGSLVTAERIDREELCAQIPLCLVKINILVEDKLKIFEVEIEIKDINDNAPNFPTEELEIKIGELTVPGTRFPIKTAFDPDVGINSLQNYKLSPNDYFSLAVNSVSEGAKYPELVLERALDREKKEIHQLVLVASDGGDPVHSGNLHIQVIVLDANDNPPMFTQPEYRVSVWENVPVGTRLLTVNATDPDEGFNAQVSYILDKMPGKIAEIFHLNSVSGEVSILKSLDYEDAMFYEIKIEAQDGPGLLSRAKILVTVLDVNDNAPEITITSLTSSVPEEGTVGREIALIDVHDRDSGQNGQVEVFVLGNLPFKLEKSIDQYYRLVTATSLDREQISEYNISLRASDGGSPPLSTETHITLHVIDINDNPPTFPHLSYSAYIPENNPRGASIFSVTAQDPDSNNNARITYALTEDTLQGAPLSSFVSINSNTGVLYALRSFDYEQFRDLKLLVTASDSGNPPLSSNVSLNLFVLDQNDNAPEILYPALPTDGSTGVELAPRSAEPGYLVTKVVAVDRDSGQNAWLSYRLLKASEPGLFSVGLHTGEVRTARALLDRDALKQSLVVAVQDHGQPPLSATVTLTVAVADRIPDILADLGSLEPSAKPNDSDLTLYLVVAVAAVSCVFLAFVIVLLALRLRRWHKSRLLQASGGGLASTPGSHFVGADGVRAFLQTYSHEVSLTADSRKSHLIFPQPNYADTLISQESCEKSEPLLITQDLLEMKGDSNLLQVSLFISLIIKNKYENVVIIKL

SEQ ID NO: 1842 - protein, 455 aa, Homo sapiens
MLATRRLLGWSLPARTAPKKTSFGSLKDEDRIFTNLYGRHDWRLKGSLSRGDWYKTKEILLKGPDWILGEIKTSGLRGRGGAGFPTGLKWSFMNKPSDGRPKYLVVNADEGEPGTCKDREILRHDPHKLLEGCLVGGRAMGARAAYIYIRGEFYNEASNLQVAIREAYEAGLIGKNACGSGYDFDVFVVRGAGAYICGEETALIESIEGKQGKPRLKPPFPADVGVFGCPTTVANVETVAVSPTICRRGGTWFAGFGRERNSGTKLFNISGHVNHPCTVEEEMSVPLKELIEKHAGGVTGGWDNLLAVIPGGSSTPLIPKSVCETVLMDFDALVQAQTGLGTAAVIVMDRSTDIVKAIARLIEFYKHESCGQCTPCREGVDWMNKVMARFVRGDARPAEIDSLWEISKQIEGHTICALGDGAAWPVQGLIRHFRPELEERMQRFAQQHQARQAAS

SEQ ID NO: 1843 - protein, 255 aa, Homo sapiens
MAFRQALQLAACGLAGGSAAVLFSAVAVGKPRAGGDAEPRPAEPPAWAGGARPGPGVWDPNWDRREPLSLINVRKRNVESGEEELASKLDHYKAKATRHIFLIRHSQYHVDGSLEKDRTLTPLGREQAELTGLRLASLGLKFNKIVHSSMTRAIETTDIISRHLPGVCKVSTDLLREGAPIEPDPPVSHWKPEAVQYYEDGARIEAAFRNYIHRADARQEEDSYEIFICHANVIRYIVCSIPPLLSAGDFVVLGS

SEQ ID NO: 1844 - protein, 240 aa, Homo sapiens
IVLNGHWRTHTGEKPYTCFECGRNFSLKSALSVHQRIHSGEKPYACTECGQGFITKSQLIRHQRTHTGEKPYVCGECGRGFIAQSTLHYHRSTHSKEKPYVCSQCGRGFCDKSTLLAHEQTHSGEKPYVCGECGRGFGRKILLNRHWRTHTGEKPYACIECGRNFSHKSTLSLHQRIHSGEKPYACVECGQSFRRKSQLIIHQKIHSGKSFRGARSEDVILATSQPSATPAEMLREKPCL

SEQ ID NO: 1845 - protein, 1712 aa, Homo sapiens
MASGSRWRPTPPPLLLLLLLALAARADGLEFGGGPGQWARYARWAGAASSGELSFSLRTNATRALLLYLDDGGDCDFLELLLVDGRLRLRFTLSCAEPATLQLDTPVADDRWHMVLLTRDARRTALAVDGEARAAEVRSKRREMQVASDLFVGGIPPDVRLSALTLSTVKYEPPFRGLLANLKLGERPPALLGSQGLRGATADPLCAPARNPCANGGLCTVLAPGEVGCDCSHTGFGGKFCSEEEHPMEGPAHLTLNSEVGSLLFSEGGAGRGGAGDVHQPTKGKEEFVATFKGNEFFCYDLSHNPIQSSTDEITLAFRTLQRNGLMLHTGKSADYVNLSLKSGAVWLVINLGSGAFEALVEPVNGKFNDNAWHDVRVTRNLRQHAGIGHAMVNKLHYLVTISVDGILTTTGYTQEDYTMLGSDDFFYIGGSPNTADLPGSPVSNNFMGCLKDVVYKNNDFKLELSRLAKEGDPKMKLQGDLSFRCEDVAALDPVTFESPEAFVALPRWSAKRTGSISLDFRTTEPNGLLLFSQGRRAGGGAGSHSSAQRADYFAMELLDGHLYLLLDMGSGGIKLRASSRKVNDGEWCHVDFQRDGRKGSISVNSRSTPFLATGDSEILDLESELYLGGLPEGGRVDLPLPPEVWTAALRAGYVGCVRDLFIDGRSRDLRGLAEAQGAVGVAPFCSRETLKQCASAPCRNGGVCREGWNRFICDCIGTGFLGRVCEREATVLSYDGSMYMKIMLPNAMHTEAEDVSLRFMSQRAYGLMMATTSRESADTLRLELDGGQMKLTVNLDCLRVGCAPSKGPETLFAGHKLNDNEWHTVRVVRRGKSLQLSVDNVTVEGQMAGAHMRLEFHNIETGIMTERRFISVVPSNFIGHLSGLVFNGQPYMDQCKDGDITYCELNARFGLRAIVADPVTFKSRSSYLALATLQAYASMHLFFQFKTTAPDGLLLFNSGNGNDFIVIELVKGYIHYVFDLGNGPSLMKGNSDKPVNDNQWHNVVVSRDPGNVHTLKIDSRTVTQHSNGARNLDLKGELYIGGLSKNMFSNLPKLVASRDGFQGCLASVDLNGRLPDLIADALHRIGQVERGCDGPSTTCTEESCANQGVCLQQWDGFTCDCTMTSYGGPVCNDPGTTYIFGKGGALITYTWPPNDRPSTRMDRLAVGFSTHQRSAVLVRVDSASGLGDYLQLHIDQGTVGVIFNVGTDDITIDEPNAIVSDGKYHVVRFTRSGGNATLQVDSWPVNERYPAGNFDNERLAIARQRIPYRLGRVVDEWLLDKGRQLTIFNSQAAIKIGGRDQGRPFQGQVSGLYYNGLKVLALAAESDPNVRTEGHLRLVGEGPSVLLSAETTATTLLADMATTIMETTTTMATTTTRRGRSPTLRDSTTQNTDDLLVASAECPSDDEDLEECEPSTGGELILPIITEDSLDPPPVATRSPFVPPPPTFYPFLTGVGATQDTLPPPAARRPPSGGPCQAERDDSDCEEPIEASGFASGEVFDSSLPPTDDEDFYTTFPLVTDRTTLLSPRKPAPRPNLRTDGATGAPGVLFAPSAPAPNLPAGKMNHRDPLQPLLENPPLGPGAPTSFEPRRPPPLRPGVTSAPGFPHLPTANPTGPGERGPPGAVEVIRESSSTTGMVVGIVAAAALCILILLYAMYKYRNRDEGSYQVDQSRNYISNSAQSNGAVVKEKAPAAPKTPSKAKKNKDKEYYV

SEQ ID NO: 1846 - protein, 437 aa, Homo sapiens [sequence omitted]

SEQ ID NO: 1847 - protein, 1253 aa, Homo sapiens [sequence omitted]

SEQ ID NO: 1848 - protein, 397 aa, Homo sapiens
MQASVPGPSEEPVVYNPTTAAFICDSLVNEKTIGSPPNEFYCSENTSVPNESNKILVNKDVPQKPGGETTPSVTDLLNYFLAPEILTGDNQYYCENCASLQNAEKTMQITEEPEYLILTLLRFSYDQKYHVRRKILDNVSLPLVLELPVKRITSFSSLSESWSVDVDFTDLSENLAKKLKPSGTDEASCTKLVPYLLSSVVVHSGISSESGHYYSYARNITSTDSSYQMYHQSEALALASSQSHLLGRDSPSAVFEQDLENKEMSKEWFLFNDSRVTFTSFQSVQKITSRFPKDTAYVLLYKKQHSTNGLSGNNPTSGLWINGDPPLQKELMDAITKDNKLYLQEQELNARARALQAASASCSFRPNGFDDNDPPGSCGPTGGGGGGGFNTVGRLVF

SEQ ID NO: 1849 - protein, 1274 aa, Homo sapiens
MGHLTLEDYQIWSVKNVLANEFLNLLFQVCHIVLGLRPATPEEEGQIIRGWLERESRYGLQAGHNWFIISMQWWQQWKEYVKYDANPVVIEPSSVLNGGKYSFGTAAHPMEQVEDRIGSSLSYVNTTEEKFSDNISTASEASETAGSGFLYSATPGADVCFARQHNTSDNNNQCLLGANGNILLHLNPQKPGAIDNQPLVTQEPVKATSLTLEGGRLKRTPQLIHGRDYEMVPEPVWRALYHWYGANLALPRPVIKNSKTDIPELELFPRYLLFLRQQPATRTQQSNIWVNMGNVPSPNAPLKRVLAYTGCFSRMQTIKEIHEYLSQRLRIKEEDMRLWLYNSENYLTLLDDEDHKLEYLKIQDEQHLVIEVRNKDMSWPEEMSFIANSSKIDRHKVPTEKGATGLSNLGNTCFMNSSIQCVSNTQPLTQYFISGRHLYELNRTNPIGMKGHMAKCYGDLVQELWSGTQKNVAPLKLRWTIAKYAPRFNGFQQQDSQELLAFLLDGLHEDLNRVHEKPYVELKDSDGRPDWEVAAEAWDNHLRRNRSIVVDLFRGQLRSQVKCKTCGHISVRFDPFNFLSLPLPMDSYMHLEITVIKLDGTTPVRYGLRLNMDEKYTGLKKQLSDLCGLNSEQILLAEVHGSNIKNFPQDNQKVRLSVSGFLCAFEIPVPVSPISASSPTQTDFSSSPSTNEMFTLTTNGDLPRPIFIPNGMPNTVVPCGTEKNFTNGMVNGHMPSLPDSPFTGYIIAVHRKMMRTELYFLSSQKNRPSLFGMPLIVPCTVHTRKKDLYDAVWIQVSRLASPLPPQEASNHAQDCDDSMGYQYPFTLRVVQKDGNSSAWCPWYRFCRGCKIDCGEDRAFIGNAYIAVDWDPTALHLRYQTSQERVVDEHESVEQSRRAQAEPINLDSCLRAFTSEEELGENEMYYCSKCKTHCLATKKLDLWRLPPILIIHLKRFQFVNGRWIKSQKIVKFPRESFDPSAFLVPRDPALCQHKPLTPQGDELSEPRILAREVKKVDAQSSAGEEDVLLSKSPSSLSANIISSPKGSPSSSRKSGTSCPSSKNSSPNSSPRTLGRSKGRLRLPQIGSKNKLSSSKENLDASKENGAGQICELADALSRGHVLGGSQPELVTPQDHEVALANGFLYEHEACGNGYSNGQLGNHSEEDSTDDQREDTRIKPIYNLYAISCHSGILGGGHYVTYAKNPNCKWYCYNDSSCKELHPDEIDTDSAYILFYEQQGIDYAQFLPKTDGKKMADTSSMDEDFESDYKKYCVLQ

SEQ ID NO: 1850 - protein, 839 aa, Homo sapiens
MALTQGQVTFRDVAIEFSQEEWTCLDPAQRTLYRDVMLENYRNLASLGISCFDLSIISMLEQGKEPFTLESQVQIAGNPDGWEWIKAVITALSSEFVMKDLLHKGKSNTGEVFQTVMLERQESQDIEGCSFREVQKNTHGLEYQCRDAEGNYKGVLLTQEGNLTHGRDEHDKRDARNKLIKNQLGLSLQSHLPELQLFQYEGKIYECNQVEKSFNNNSSVSPPQQMPYNVKTHISKKYLKDFISSLLLTQGQKANNWGSPYKSDGCGMVFPQNSHLASHQRSHTKEKPYKCYECGKAFRTRSNLTTHQVIHTGEKRYKCNECGKVFSRNSQLSQHQKIHTGEKPYKCNECGKVFTQNSHLVRHRGIHTGEKPYKCNECGKAFRARSSLAIHQATHSGEKPYKCNECGKVFTQNSHLTNHWRIHTGEKPYKCNECGKAFGVRSSLAIHLVIHTGEKPYKCHECGKVFRRNSHLARHQLIHTGEKPYKCNECGKAFRAHSNLTTHQVIHTGEKPYKCNECGKVFTQNSHLANHQRIHTGVKPYMCNECGKAFSVYSSLTTHQVIHTGEKPYKCNECGKVFTQNSHLARHRGIHTGEKPYKCNECGKVFRHNSYLSRHQRIHTGEKPYKYNEYGKAFSEHSNLTTHQVIHTGEKPYKCNECGKVFTQNSHLARHRRVHTGGKPYQCNECGKAFSQTSKLARHQRVHTGEKPYECNQCGKAFSVRSSLTTHQAIHTGKKPYKCNECGKVFTQNSHLARHRGIHTGEKPYKCNECGKAFSQTSKLARHQRIHTGEKPYECGKPFSICSSLTTHQTIHTGGKPYKCNVWKVLKSEFKPCKPSQNS

SEQ ID NO: 1851 - protein, 163 aa, Homo sapiens
MAAAVVLAAGLRAARRAVAATGVRGGQVRGAAGVTDGNEVAKAQQATPGGAAPTIFSRILDKSLPADILYEDQQCLVFRDVAPQAPVHFLVIPKKPIPRISQAEEEDQQLLGHLLLVAKQTAKAEGLGDGYRLVINDGKLGAQSVYHLHIHVLGGRQLQWPPG

SEQ ID NO: 1852 - protein, 176 aa, Homo sapiens
MARVLKAAAANAVGLFSRLQAPIPTVRASSTSQPLDQVTGSVWNLGRLNHVAIAVPDLEKAAAFYKNILGAQVSEAVPLPEHGVSVVFVNLGNTKMELLHPLGRDSPIAGFLQKNKAGGMHHICIEVDNINAAVMDLKKKKIRSLSEEVKIGAHGKPVIFLHPKDCGGVLVELEQA

SEQ ID NO: 1853 - protein, 829 aa, Homo sapiens [sequence omitted]

SEQ ID NO: 1854 - protein, 218 aa, Homo sapiens
MGTRDDEYDYLFKVVLIGDSGVGKSNLLSRFTRNEFNLESKSTIGVEFATRSIQVDGKTIKAQIWDTAGQERYRAITSAYYRGAVGALLVYDIAKHLTYENVERWLKELRDHADSNIVIMLVGNKSDLRHLRAVPTDEARAFAEKNNLSFIETSALDSTNVEEAFKNILTEIYRIVSQKQIADRAAHDESPGNNVVDISVPPTTDGQKPNKLQCCQNL

SEQ ID NO: 1855 - protein, 619 aa, Homo sapiens
MAAAPPLSKAEYLKRYLSGADAGVDRGSESGRKRRKKRPKPGGAGGKGMRIVDDDVSWTAISTTKLEKEEEEDDGDLPVVAEFVDERPEEVKQMEAFRSSAKWKLLGGHNEDLPSNRHFRHDTPDSSPRRVRHGTPDPSPRKDRHDTPDPSPRRARHDTPDPSPLRGARHDSDTSPPRRIRHDSSDTSPPRRARHDSPDPSPPRRPQHNSSGASPRRVRHDSPDPSPPRRARHGSSDISSPRRVHNNSPDTSRRTLGSSDTQQLRRARHDSPDLAPNVTYSLPRTKSGKAPERASSKTSPHWKESGASHLSFPKNSKYEYDPDISPPRKKQAKSHFGDKKQLDSKGDCQKATDSDLSSPRHKQSPGHQDSDSDLSPPRNRPRHRSSDSDLSPPRRRQRTKSSDSDLSPPRRSQPPGKKAAHMYSGAKTGLVLTDIQREQQELKEQDQETMAFEAEFQYAETVFRDKSGRKRNLKLERLEQRRKAEKDSERDELYAQWGKGLAQSRQQQQNVEDAMKEMQKPLARYIDDEDLDRMLREQEREGDPMANFIKKNKAKENKNKKVRPRYSGPAPPPNRFNIWPGYRWDGVDRSNGFEQKRFARLASKKAVEELAYKWSVEDM

SEQ ID NO: 1856 - protein, 499 aa, Homo sapiens
MSFGSEHYLCSSSSYRKVFGDGSRLSARLSGAGGAGGFRSQSLSRSNVASSAACSSASSLGLGLAYRRPPASDGLDLSQAAARTNEYKIIRTNEKEQLQGLNDRFAVFIEKVHQLETQNRALEAELAALRQRHAEPSRVGELFQRELRDLRAQLEEASSARSQALLERDGLAEEVQRLRARCEEESRGREGAERALKAQQRDVDGATLARLDLEKKVESLLDELAFVRQVHDEEVAELLATLQASSQAAAEVDVTVAKPDLTSALREIRAQYESLAAKNLQSAEEWYKSKFANLNEQAARSTEAIRASREEIHEYRRQLQARTIEIEGLRGANESLERQILELEERHSAEVAGYQDSIGQLENDLRNTKSEMARHLREYQDLLNVKMALDIEIAAYRKLLEGEETRFSTSGLSISGLNPLPNPSYLLPPRILSATTSKVSSTGLSLKKEEEEEEASKVASKKTSQIGESFEEILEETVISTKKTEKSNIEETTISSQKI

SEQ ID NO: 1857 - protein, 58 aa, Homo sapiens
MAGPESDAQYQFTGIKKYFNSYTLTGRMNCVLATYGSIALIVLYFKLRSKKTPAVKAT

SEQ ID NO: 1858 - protein, 712 aa, Homo sapiens
MAAAGLVAVAAAAEYSGTVASGGNLPGVHCGPSSGAGPGFGPGSWSRSLDRALEEAAVTGVLSLSGRKLREFPRGAANHDLTDTTRADLSRNRLSEIPIEACHFVSLENLNLYQNCIRYIPEAILNLQALTFLNISRNQLSTLPVHLCNLPLKVLIASNNKLVSLPEEIGHLRHLMELDVSCNEIQTIPSQIGNLEALRDLNVRRNHLVHLPEELAELPLIRLDFSCNKITTIPVCYRNLRHLQTITLDNNPLQSPPAQICIKGKVHIFKYLNIQACKIAPDLPDYDRRPLGFGSCHEELYSSRPYGALDSGFNSVDSGDKRWSGNEPTDEFSDLPLRVAEITKEQRLRRESQYQENRGSLVVTNGGVEHDLDQIDYIDSCTAEEEEAEVRQPKGPDPDSLSSQFMAYIEQRRISHEGSPVKPVAIREFQKTEDMRRYLHQNRVPAEPSSLLSLSASHNQLSHTDLELHQRREQLVERTRREAQLAALQYEEEKIRTKQIQRDAVLDFVKQKASQSPQKQHPLLDGVDGECPFPSRRSQHTDDSALCMSLSGLNQVGCAATLPHSSAFTPLKSDDRPNALLSSPATETVHHSPAYSFPAAIQRNQPQRPESFLFRAGVRAETNKGHASPLPPSAAPTTDSTDSITGQNSRQREEELELIDQLRKHIEYRLKVSLPCDLGAALTDGVVLCHLANHVRPRSVPSIHVPSPAVVS

SEQ ID NO: 1859 - protein, 179 aa, Homo sapiens
MDKVCAVFGGSRGIGRAVAQLMARKGYRLAVIARNLEGAKAAAGDLGGDHLAFSCDVAKEHDVQNTFEEMEKHLGRVNFLVNAAGINRDGLLVRTKTEDMVSQLHTNLLGSMLTCKAAMRTMIQQQGGSIVNVGSIVGLKGNSGQSVYSASKGGLVGFSRALAKEVARKKIRVNVVAPG

SEQ ID NO: 1860 - protein, 797 aa, Homo sapiens
MASCRAWNLRVLVAVVCGLLTGIILGLGIWRIVIRIQRGKSTSSSSTPTEFCRNGGTWENGRCICTEEWKGLRCTIANFCENSTYMGFTFARIPVGRYGPSLQTCGKDTPNAGNPMAVRLCSLSLYGEIELQKVTIGNCNENLETLEKQVEDVTAPLNNISSEVQILTSDANKLTAENITSATRVVGQIFNTSRNASPEAKKVAIVTVSQLLDASEDAFQRVAATANDDALTTLIEQMETYSLSLGNQSVVEPNIAIQSANFSSENAVGPSNVRFSVQKGASSSLVSSSTFIHTNVDGLNPDAQTELQVLLNMTKNYTKTCGFVVYQNDKLFQSKTFTAKSDFSQKIISSKTDENEQDQSASVDMVFSPKYNQKEFQLYSYACVYWNLSAKDWDTYGCQKDKGTDGFLRCRCNHTTNFAVLMTFKKDYQYPKSLDILSNVGCALSVTGLALTVIFQIVTRKVRKTSVTWVLVNLCISMLIFNLLFVFGIENSNKNLQTSDGDINNIDFDNNDIPRTDTINIPNPMCTAIAALLHYFLLVTFTWNALSAAQLYYLLIRTMKPLPRHFILFISLIGWGVPAIVVAITVGVIYSQNGNNPQWELDYRQEKICWLAIPEPNGVIKSPLLWSFIVPVTIILISNVVMFITISIKVLWKNNQNLTSTKKVSSMKKIVSTLSVAVVFGITWILAYLMLVNDDSIRIVFSYIFCLFNTTQGLQIFILYTVRTKVFQSEASKVLMLLSSIGRRKSLPSVTRPRLRVKMYNFLRSLPTLHERFRLLETSPSTEEITLSESDNAKESI

SEQ ID NO: 1861 - protein, 732 aa, Homo sapiens; identical to SEQ ID NO: 1790

SEQ ID NO: 1862 - protein, 330 aa, Homo sapiens
MPASREEGGGRGEGGAYHHRQPHHHFHHGGHRGGSLLQHVGGDHRGHSEEGGDEQPGTPAPALSELKAVICWLQKGLPFILILLAKLCFQHKLGIAVCIGMASTFAYANSTLREQVSLKEKRSVLVILWILAFLAGNTLYVLYTFSSQQLYNSLIFLKPNLEMLDFFDLLWIVGIADFVLKYITIALKCLIVALPKIILAVKSKGKFYLVIEELSQLFRSLVPIQLWYKYIMGDDSSNSYFLGGVLIVLYSLCKSFDICGRVGGVRKALKLLCTSQNYGVRATGQQCTEAGDICAICQAEFREPLILLCQMLLKGHKKLELEKIDESAGV

SEQ ID NO: 1863 - protein, 373 aa, Homo sapiens [sequence omitted]

SEQ ID NO: 1864 - protein, 654 aa, Homo sapiens
MSLAAYCVICCRRIGTSTSPPKSGTHWRDIRNIIKFTGSLILGGSLFLTYEVLALKKAVTLDTQVVEREKMKSYIYVHTVSLDKGENHGIAWQARKELHKAVRKVLATSAKILRNPFADPFSTVDIEDHECAVWLLLRKSKSDDKTTRLEAVREMSETHHWHDYQYRIIAQACDPKTLIGLARSEESDLRFFLLPPPLPSLKEDSSTEEELRQLLASLPQTELDECIQYFTSLALSESSQSLAAQKGGLWCFGGNGLPYAESFGEVPSATVEMFCLEAIVKHSEISTHCDKIEANGGLQLLQRLYRLHKDCPKVQRNIMRVIGNMALNEHLHSSIVRSGWVSIMAEAMKSPHIMESSHAARILANLDRETVQEKYQDGVYVLHPQYRTSQPIKADVLFIHGLMGAAFKTWRQQDSEQAVIEKPMEDEDRYTTCWPKTWLAKDCPALRIISVEYDTSLSDWRARCPMERKSIAFRSNELLRKLRAAGVGDRPVVWISHSMGGLLVKKMLLEASTKPEMSTVINNTRGIIFYSVPHHGSRLAEYSVNIRYLLFPSLEVKELSKDSPALKTLQDDFLEFAKDKNFQVLNFVETLPTYIGSMIKLHVVPVESADLGIGDLIPVDVNHLNICKPKKKDAFLYQRTLQFIREALAKDLEN

SEQ ID NO: 1865 - protein, 422 aa, Homo sapiens
MFSNSDEAVINKKLPKELLLRIFSFLDVVTLCRCAQVSRAWNVLALDGSNWQRIDLFDFQRDIEGRVVENISKRCGGFLRKLSLRGCLGVGDNALRTFAQNCRNIEVLNLNGCTKTTDATCTSLSKFCSKLRHLDLASCTSITNMSLKALSEGCPLLEQLNISWCDQVTKDGIQALVRGCGGLKALFLKGCTQLEDEALKYIGAHCPELVTLNLQTCLQITDEGLITICRGCHKLQSLCASGCSNITDAILNALGQNCPRLRILEVARCSQLTDVGFTTLARNCHELEKMDLEECVQITDSTLIQLSIHCPRLQVLSLSHCELITDDGIRHLGNGACAHDQLEVIELDNCPLITDASLEHLKSCHSLERIELYDCQQITRAGIKRLRTHLPNIKVHAYFAPVTPPPSVGGSRQRFCRCCIIL

SEQ ID NO: 1866 - protein, 538 aa, Homo sapiens [sequence omitted]

SEQ ID NO: 1867 - protein, 256 aa, Homo sapiens
MAAAVGRLLRASVARHVSAIPWGISATAALWPAACGRTSLTNLLCSGSSQAKLFSTSSSCHAPAVTQHAPYFKGTAVVNGEFKDLSLDDFKGKYLVLFFYPLDFTFVCPTEIVAFSDKANEFHDVNCEVVAVSVDSHFSHLAWINTPRKNGGLGHMNIALLSDLTKQISRDYGVLLEGSGLALRGLFIIDPNGVIKHLSVNDLPVGRSVEETLRLVKAFQYVETHGEVCPANWTPDSPTIKPSPAASKEYFQKVNQ

SEQ ID NO: 1868 - protein, 113 aa, Homo sapiens
MAALGSPAHTFRGLLRELRYLSAATGRPYRDTAAYRYLVKAFRAHRVTSEKLCRAQHELHFQAATYLCLLRSIRKHVALHQEFHGKGERSVEESAGLVGLKLPHQPGGKGWEP

SEQ ID NO: 1869 - protein, 537 aa, Homo sapiens
LNQHRRIKLSPLMMYEKLSMIRFRYRILRSQHFRTKSKVCKLRKAQRSWVQKVTGDHQETRRENGEGGSCSPFPSPEPKDPSCRHQPYFPDMDSSAVVKGTNSHVPDCHTKGSSFLGKELSLDEAFPDQQNGSATNAWDQSSCSSPKWECTELIHDIPLPEHRSNTMFISETEREIMTLGQENQTSSVSDDRVKLSVSGADTSVSSVDGPVSQKAVQNENSYQMEEDGSLKQSILSSELLDHPYCKSPLEAPLVCSGLKLENQVGGGKNSQKASPVDDEQLSVCLSGFLDEVMKKYGSLVPLSEKEVLGRLKDVFNEDFSNRKPFINREITNYRARHQKCNFRIFYNKHMLDMDDLATLDGQNWLNDQVINMYGELIMDAVPDKVHFFNSFFHRQLVTKGYNGVKRWTKKVDLFKKSLLLIPIHLEVHWSLITVTLSNRIISFYDSQGIHFKFCVENIRKYLLTEAREKNRPEFLQGWQTAVTKCIPQQKNDSDCGVFVLQYCKCLALEQPFQFSQEDMPRVRKRIYKELCECRLMD

SEQ ID NO: 1870 - protein, 295 aa, Homo sapiens [sequence omitted]

SEQ ID NO: 1871 - protein, 1086 aa, Homo sapiens
MKDSCITVMAMALLSGFFFFAPASSYNLDVRGARSFSPPRAGRHFGYRVLQVGNGVIVGAPGEGNSTGSLYQCQSGTGHCLPVTLRGSNYTSKYLGMTLATDPTDGSILFAAVQFSTSYKTEFDFSDYVKRKDPDALLKHVKHMLLLTNTFGAINYVATEVFREELGARPDATKVLIIITDGEATDSGNIDAAKDIIRYIIGIGKHFQTKESQETLHKFASKPASEFVKILDTFEKLKDLFTELQKKIYVIEGTSKQDLTSFNMELSSSGISADLSRGHAVVGAVGAKDWAGGFLDLKADLQDDTFIGNEPLTPEVRAGYLGYTVTWLPSRQKTSLLASGAPRYQHMGRVLLFQEPQGGGHWSQVQTIHGTQIGSYFGGELCGVDVDQDGETELLLIGAPLFYGEQRGGRVFIYQRRQLGFEEVSELQGDPGYPLGRFGEAITALTDINGDGLVDVAVGAPLEEQGAVYIFNGRHGGLSPQPSQRIEGTQVLSGIQWFGRSIHGVKDLEGDGLADVAVGAESQMIVLSSRPVVDMVTLMSFSPAEIPVHEVECSYSTSNKMKEGVNITICFQIKSLIPQFQGRLVANLTYTLQLDGHRTRRRGLFPGGRHELRRNIAVTTSMSCTDFSFHFPVCVQDLISPINVSLNFSLWEEEGTPRDQRAGKDIPPILRPSLHSETWEIPFEKNCGEDKKCEANLRVSFSPARSRALRLTAFASLSVELSLSNLEEDAYWVQLDLHFPPGLSFRKVEMLKPHSQIPVSCEELPEESRLLSRALSCNVSSPIFKAGHSVALQMMFNTLVNSSWGDSVELHANVTCNNEDSDLLEDNSATTIIPILYPINILIQDQEDSTLYVSFTPKGPKIHQVKHMYQVRIQPSIHDHNIPTLEAVVGVPQPPSEGPITHQWSVQMEPPVPCHYEDLERLPDAAEPCLPGALFRCPVVFRQEILVQVIGTLELVGEIEASSMFSLCSSLSISFNSSKHFHLYGSNASLAQVVMKVDVVYEKQMLYLYVLSGIGGLLLLLLIFIVLYKVGFFKRNLKEKMEAGRGVPNGIPAEDSEQLASGQEAGDPGCLKPLHEKDSESGGGKD

SEQ ID NO: 1872 - protein, 394 aa, Homo sapiens
ARGNLHLFSGHLSTLRLSFPNLFKFLAWNSPPLTSEFVALLPALVDAGTALEMLHALLDLPCLTAVLDLQLRSAPAASERPLWDTSLRAPSCLEAFRDPQFQGLFQYLLRPKASGATERLAPLHQLLQPMAGCARVAQCAQAVPTLLQAFFSAVTQVADGSLINQLALLLLGRSDSLYPAPGYAAGVHSVLSSQFLALCTLKPSLVVELARDLLEFLGSVNGLCSRASLVTSVVWAIGEYLSVTYDRRCTVEQINKFFEALEALLFEVTQCRPSAALPRCPPQVVTVLMTTLTKLASRSQDLIPRASLLLSKMRTLAHSPATSSTHSEEGAEAIRTRATELLTLLKMPSVAQFVLTPSTEVCSPRYHRDANTALPLALRTVSRLVEREAGLMPG

SEQ ID NO: 1873 - protein, 241 aa, Homo sapiens
MAEEQPQVELFVKAGSDGAKIGNCPFSQRLFMVLWLKGVTFNVTTVDTKRRTETVQKLCPGGQLPFLLYGTEVHTDTNKIEEFLEAVLCPPRYPKLAALNPESNTAGLDIFAKFSAYIKNSNPALNDNLEKGLLKALKVLDNYLTSPLPEEVDETSAEDEGVSQRKFLDGNELTLADCNLLPKLHIVQVVCKKYRGFTIPEAFRGVHRYLSNAYAREEFASTCPDDEEIELAYEQVAKALK

SEQ ID NO: 1874 - protein, 62 aa, Homo sapiens
MDPRECVCMSGGICMCGDNCKCTTCNCKTCRKSCCPCCPPGCAKCARGCICKGGSDKCSCCP

SEQ ID NO: 1875 - protein, 379 aa, Homo sapiens
MEELQDDYEDMMEENLEQEEYEDPDIPESQMEEPAAHDTEATATDYHTTSHPGTHKVYVELQELVMDEKNQELRWMEAARWVQLEENLGENGAWGRPHLSHLTFWSLLELRRVFTKGTVLLDLQETSLAGVANQLLDRFIFEDQIRPQDREELLRALLLKHSHAGELEALGGVKPAVLTRSGDPSQPLLPQHSSLETQLFCEQGDGGTEGHSPSGILEKIPPDSEATLVLVGRADFLEQPVLGFVRLQEAAELEAVELPVPIRFLFVLLGPEAPHIDYTQLGRAAATLMSERVFRIDAYMAQSRGELLHSLEGFLDCSLVLPPTDAPSEQALLSLVPVQRELLRRRYQSSPAKPDSSFYKGLDLNGGPDDPLQQTGQLF

SEQ ID NO: 1876 - protein, 875 aa, Homo sapiens
MHDAFEPVPILEKLPLQIDCLAAWEEWLLVGTKQGHLLLYRIRKDVGCNRFEVTLEKSNKNFSKKIQQIHVVSQFKILVSLLENNIYVHDLLTFQQITTVSKAKGASLFTCDLQHTETGEEVLRMCVAVKKKLQLYFWKDREFHELQGDFSVPDVPKSMAWCENSICVGFKRDYYLIRVDGKGSIKELFPTGKQLEPLVAPLADGKVAVGQDDLTVVLNEEGICTQKCALNWTDIPVAMEHQPPYIIAVLPRYVEIRTFEPRLLVQSIELQRPRFITSGGSNIIYVASNHFVWRLIPVPMATQIQQLLQDKQFELALQLAEMKDDSDSEKQQQIHHIKNLYAFNLFCQKRFDESMQVFAKLGTDPTHVMGLYPDLLPTDYRKQLQYPNPLPVLSGAELEKAHLALIDYLTQKRSQLVKKLNDSDHQSSTSPLMEGTPTIKSKKKLLQIIDTTLLKCYLHTNVALVAPLLRLENNHCHIEESEHVLKKAHKYSELIILYEKKGLHEKALQVLVDQSKKANSPLKGHERTVQYLQHLGTENLHLIFSYSVWVLRDFPEDGLKIFTEDLPEVESLPRDRVLGFLIENFKGLAIPYLEHIIHVWEETGSRFHNCLIQLYCEKVQGLMKEYLLSFPAGKTPVPAGEEEGELGEYRQKLLMFLEISSYYDPGRLICDFPFDGLLEERALLLGRMGKHEQALFIYVHILKDTRMAEEYCHKHYDRNKDGNKDVYLSLLRMYLSPPSIHCLGPIKLELLEPKANLQAALQVLELHHSKLDTTKALNLLPANTQINDIRIFLEKVLEENAQKKRFNQVLKNLLHAEFLRVQEERILHQQVKCIITEEKVCMVCKKKIGNSAFARYPNGVVVHYFCSKEVNPADT

SEQ ID NO: 1877 - protein, 751 aa, Homo sapiens [sequence omitted]

SEQ ID NO: 1878 - protein, 457 aa, Homo sapiens
MTTEDYKKLAPYNIRRSSTSGDTEEEEEEEVVPFSSDEQKRRSEAASGVLRRTAPREHSYVLSAAKKSTGSPTQETQAPFIAKRVEVVEEDGPSEKSQDPPALARSTPGSNSSRGEEIVRLQILTPRAGLRLVAPDVEGMSSSATSVSAVPADRKSNSTAAQEDAKADPKGALADYEGKDVATRVGEAWQERPGAPRGGQGDPAVPAQQPADPSTPERQSSPSGSEQLVRRESCGSSVLTDFEGKDVATKVGEAWQDRPGAPRGGQGDPAVPTQQPADPSTPEQQNSPSGSEQFVRRESCTSRVRSPSSCMVTVTVTATSEQPHIYIPAPASELDSSSTTKGILFVKEYVNASEVSSGKPVSARYSNVSSIEDSFAMEKKPPCGSTPYSERTTGGICTYCNREIRDCPKITLEHLGICCHEYCFKCGICSKPMGDLLDQIFIHRDTIHCGKCYEKLF

SEQ ID NO: 1879 - protein, 464 aa, Homo sapiens
MSSRSTKDLIKSKWGSKPSNSKSETTLEKLKGEIAHLKTSVDEITSGKGKLTDKERHRLLEKIRVLEAEKEKNAYQLTEKDKEIQRLRDQLKARYSTTALLEQLEETTREGERREQVLKALSEEKDVLKQQLSAATSRIAELESKTNTLRLSQTVAPNCFNSSINNIHEMEIQLKDALEKNQQWLVYDQQREVYVKGLLAKIFELEKKTETAAHSLPQQTKKPESEGYLQEEKQKCYNDLLASAKKDLEVERQTITQLSFELSEFRRKYEETQKEVHNLNQLLYSQRRADVQHLEDDRHKTEKIQKLREENDIARGKLEEEKKRSEELLSQVQFLYTSLLKQQEEQTRVALLEQQMQACTLDFENEKLDRQHVQHQLLVILKELRKARNQITQLESLKQLHEFAITEPLVTFQGETENREKVAASPKSPTAALNESLVECPKCNIQYPATEHRDLLVHVEYCSK

SEQ ID NO: 1880 - protein, 2392 aa, Homo sapiens [sequence omitted]

SEQ ID NO: 1881 - protein, 175 aa, Homo sapiens
TLQASFLTKKLNIGGKRVNLAIWDTAGQERFHALGPIYYRDSNGAILVYDITDEDSFQKVKNWVKELRKMLGNEICLCIVGNKIDLEKERHVSIQEAESYAESVGAKHYHTSAKQNKGIEELFLDLCKRMIETAQVDERAKGNGSSQPGTARRGVQIIDDEPQAQTSGGGCCSSG

SEQ ID NO: 1882 - protein, 1172 aa, Homo sapiens
FMSMFQILTQEGWVDVMDQTLNAVGHMWAPVVAIYFILYHLFATLILLSLFVAVILDNLELDEDLKKLKQLKQSEANADTKEKLPLRLRIFEKFPNRPQMVKISKLPSDFTVPKIRESFMKQFIDRQQQDTCCLLRSLPTTSSSSCDHSKRSAIEDNKYIDQKLRKSVFSIRARNLLEKETAVTKILRACTRQRMLSGSFEGQPAKERSILSVQHHIRQERRSLRHGSNSQRISRGKSLETLTQDHSNTVRYRNAQREDSEIKMIQEKKEQAEMKRKVQEEELRENHPYFDKPLFIVGREHRFRNFCRVVVRARFNASKTDPVTGAVKNTKYHQLYDLLGLVTYLDWVMIIVTICSCISMMFESPFRRVMHAPTLQIAEYVFVIFMSIELNLKIMADGLFFTPTAVIRDFGGVMDIFIYLVSLIFLCWMPQNVPAESGAQLLMVLRCLRPLRIFKLVPQMRKVVRELFSGFKEIFLVSILLLTLMLVFASFGVQLFAGKLAKCNDPNIIRREDCNGIFRINVSVSKNLNLKLRPGEKKPGFWVPRVWANPRNFNFDNVGNAMLALFEVLSLKGWVEVRDVIIHRVGPIHGIYIHVFVFLGCMIGLTLFVGVVIANFNENKGTALLTVDQRRWEDLKSRLKIAQPLHLPPRPDNDGFRAKMYDITQHPFFKRTIALLVLAQSVLLSVKWDVEDPVTVPLATMSVVFTFIFVLEVTMKIIAMSPAGFWQSRRNRYDLLVTSLGVVWVVLHFALLVTLKMLLLTVVVSMYKSFFIIVGMFLLLLCYAFAGVVLFGTVKYGENINRHANFSSAGKAITVLFRIVTGEDWNKIMHDCMVQPPFCTPDEFTYWATDCGNYAGALMYFCSFYVIIAYIMLNLLVAIIVENFSLFYSTEEDQLLSYNDLRHFQIIWNMVDDKREGVIPTFRVKFLLRLLRGRLEVDLDKDKLLFKHMCYEMERLHNGGDVTFHDVLSMLSYRSVDIRKSLQLEELLAREQLEYTIEEEVAKQTIRMWLKKCLKRIRAKQQQSCSIIHSLRESQQQELSRFLNPPSIETTQPSEDTNANSQDNSMQPETSSQQQLLSPTLSDRGGSRQDAADAGKPQRKFGQWRLPSAPKPISHSVSSVNLRFGGRTTMKSVVCKMNPMTDAASCGSEVKKWWTRQLTVESDESGDDLLDI

SEQ ID NO: 1883 - protein, 372 aa, Homo sapiens
LTAAAAAAAAATNAAIAEAMKVKKIKLEAMSNYHASNNQHGADSENGDMNSSVGLELPFMMMPHPLIPVSLPPASVTMAMSQMNHLSTIANMAAAAQVQSPPSRVETSVIKERVPDSPSPAPSLEEGRRPGSHPSSHRSSSVSSSPARTESSSDRIPVHQNGLSMNQMLMGLSPNVLPGPKEGDLAGHDMGHESKRMHIEKDETPLSTPTARDSLDKLSLTGHGQPLPPGFPSPFLFPDGLSSIETLLTNIQGLLKVAIDNARAQEKQVQLEKTELKMDFLRERELRETLEKQLAMEQKNRAIVQKRLKKEKKAKRKLQEALEFETKRREQAEQTLKQAASTDSLRVLNDSLTPEIEADRSGGRTDAERTIQ

SEQ ID NO: 1884 - protein, 402 aa, Homo sapiens
MARTDQKPPCRGGCWGQPGHPNTGGAAAHPTYHPMGHRPRTCILLRGDQTTGGQAPSREISLGPWAAGTHFLAISTTPWGRKTPACISELPTSSGTAQPLANAVCEVQTVPGPGLRPQGTPAMRAPSHKGTPPTPNPWGPEQPQNRHKHPKKGVTGGPSPPPPAASRYGQTPGREPRVQAPGLGPCGRPASGRLLSLHLEKGDGKGTRQRIPLTDAAVGGDRTDIPSAIAAGPARTPDRHGLPIPGSTPTPMVGSGRLGAPVGRSGGGASARSSRPSCANVLLRADASLGTVLSVLWTGQLSRGWALLPPGDAGRHLETSVISAGVAAGIWLVEPGEAAQDPATRRTAPPRRTASPEPPAPGAPLPACPGRIPGAARFGPRSCPLGSPAVLAVTTGWSHRSV

SEQ ID NO: 1885 - protein, 299 aa, Homo sapiens [sequence omitted]

SEQ ID NO: 1886 - protein, 43 aa, Homo sapiens
MPDSWDKDVYPEPPRRTPVQPNPIVYMMKAFDLIVDRPVTLVR

SEQ ID NO: 1887 - protein, 442 aa, Homo sapiens
MAPRSLLLLLSGALALTDTWAGSHSLRYFSTAVSRPGRGEPRYIAVEYVDDTQFLRFDSDAAIPRMEPREPWVEQEGPQYWEWTTGYAKANAQTDRVALRNLLRRYNQSEAGSHTLQGMNGCDMGPDGRLLRGYHQHAYDGKDYISLNEDLRSWTAADTVAQITQRFYEAEEYAEEFRTYLEGECLELLRRYLENGKETLQRADPPKAHVAHHPISDHEATLRCWALGFYPAEITLTWQRDGEEQTQDTELVETRPAGDGTFQKWAAVVVPSGEEQRYTCHVQHEGLPQPLILRWEQSPQPTIPIVGIVAGLVVLGAVVTGAVVAAVMWRKKSSDRNRGSYSQAAAYSVVSGLLMITWWSSLFLLGVLFQGYLGCLRSHSVLGRRKVGDMWILFFLWLWTSFNTAFLALQSLRFGFGFRRGRSFLLRSWHHLMKRVQIKIFD

SEQ ID NO: 1888 - protein, 359 aa, Homo sapiens [sequence omitted]

SEQ ID NO: 1889 - protein, 373 aa, Homo sapiens
ARGVRALWPGGCALAWRLGGRPQPLLPTQSRAGFAGAAGGPSPVAAARKGSPRLLGAAALALGGALGLYHTARWHLRAQDLHAERSAAQLSLSSRLQLTLYQYKTCPFCSKVRAFLDFHALPYQVVEVNPVRRAEIKFSSYRKVPILVAQEGESSQQLNDSSVIISALKTYLVSGQPLEEIITYYPAMKAVNEQGKEVTEFGNKYWLMLNEKEAQQVYGGKEARTEEMKWRQWADDWLVHLISPNVYRTPTEALASFDYIVREGKFGAVEGAVAKYMGAAAMYLISKRLKSRHRLQDNVREDLYEAADKWVAAVGKDRPFMGGQKPNLADLAVYGVLRVMEGLDAFDDLMQHTHIQPWYLRVERAITEASPAH

SEQ ID NO: 1890 - protein, 62 aa, Homo sapiens
FCALGDRILGAGGTDKLIFGKGTRVTVEPRSQPHTKPSVFVMKNGTNVACLVKEFYPKDIRI

SEQ ID NO: 1891 - protein, 557 aa, Homo sapiens
AALTRDPQFQKLQQWYREHRSELNLRRLFDANKDRFNHFSLTLNTNHGHILVDYSKNLVTEDVMRMLVDLAKSRGVEAARERMFNGEKINYTEGRAVLHVALRNRSNTPILVDGKDVMPEVNKVLDKMKSFCQRVRSGDWKGYTGKTITDVINIGIGGSDLGPLMVTEALKPYSSGGPRVWYVSNIDGTHIAKTLAQLNPESSLFIIASKTFTTQETITNAETAKEWFLQAAKDPSAVAKHFVALSTNTTKVKEFGIDPQNMFEFWDWVGGRYSLWSAIGLSIALHVGFDNFEQLLSGAHWMDQHFRTTPLEKNAPVLLALLGIWYINCFGCETHAMLPYDQYLHRFAAYFQQGDMESNGKYITKSGTRVDHQTGPIVWGEPGTNGQHAFYQLIHQGTKMIPCDFLIPVQTQHPIRKGLHHKILLANFLAQTEALMRGKSTEEARKELQAAGKSPEDLERLLPHKVFEGNRPTNSIVFTKLTPFMLGALVAMYEHKIFVQGIIWDINSFDQWGVELGKQLAKKIEPELDGSAQVTSHDASTNGLINFIKQQREARVQ

SEQ ID NO: 1892 - protein, 319 aa, Homo sapiens
KASLAADIPRLGYSSSSHHKYIPRRAVLYVPGNDEKKIKKIPSLNVDCAVLDCEDGVAANKKNEARLRIVKTLEDIDLGPTEKCVRVNSVSSGLAEEDLETLLQSRVLPSSLMLPKVESPEEIQWFADKFSFHLKGRKLEQPMNLIPFVETAMGLLNFKAVCEETLKVGPQVGLFLDAVVFGGEDFRASIGATSSKETLDILYARQKIVVIAKAFGLQAIDLVYIDFRDGAGLLRQSREGAAMGFTGKQVIHPNQIAVVQEQFSPSPEKIKWAEELIAAFKEHQQLGKGAFTFQGSMIDMPLLKQAQNTVTLATSIKEK

SEQ ID NO: 1893 - protein, 956 aa, Homo sapiens [sequence omitted]

SEQ ID NO: 1894 - protein, 1455 aa, Homo sapiens
MGGACSSFTTSSSPTIYSTSVTDSKAMQVESCSSAVGVSNRGVSEKQLTSNTVQQHPSTPKRHTVLYISPPPEDLLDNSRMSCQDEGCGLESEQSCSMWMEDSPSNFSNMSTSSYNDNTEVPRKSRKRNPKQRPGVKRRDCEESNMDIFDADSAKAPHYVLSQLTTDNKGNSKAGNGTLENQKGTGVKKSPMLCGQYPVKSEGKELKIVVQPETQHRARYLTEGSRGSVKDRTQQGFPTVKLEGHNEPVVLQVFVGNDSGRVKPHGFYQACRVTGRNTTPCKEVDIEGTTVIEVGLDPSNNMTLAVDCVGILKLRNADVEARIGIAGSKKKSTRARLVFRVNIMRKDGSTLTLQTPSSPILCTQPAGVPEILKKSLHSCSVKGEEEVFLIGKNFLKGTKVIFQENVSDENSWKSEAEIDMELFHQNHLIVKVPPYHDQHITLPVSVGIYVVTNAGRSHDVQPFTYTPDPAAAGALNVNVKKEISSPARPCSFEEAMKAMKTTGCNLDKVNIIPNALMTPLIPSSMIKSEDVTPMEVTAEKRSSTIFKTTKSVGSTQQTLENISNIAGNGSFSSPSSSHLPSENEKQQQIHAKAYNPETLTTIQTQDISQPGTFPAVSASSQLPNSDALLQQATQFQTRETQSREILQSDGTVVNLSQLTEASQQQQQSPLQEQAQTLQQQISSNIFPSPNSVSQLQNTIQQLQAGSFTGSTASGSSGSVDLVQQVLEAQQQLSSVLFSAPDGNENVQEQLSADIFQQVSQIQSGVSPGMFSSTEPTVHTRPDNLLPGRAESVHPQSENTLSNQQQQQQQQQQVMESSAAMVMEMQQSICQAAAQIQSELFPSTASANGNLQQSPVYQQTSHMMSALSTNEDMQMQCELFSSPPAVSGNETSTTTTQQVATPGTTMFQTSSSGDGEETGTQAKQIQNSVFQTMVQMQHSGDNQPQVNLFSSTKSMMSVQNSGTQQQGNGLFQQGNEMMSLQSGNFLQQSSHSQAQLFHPQNPIADAQNLSQETQGSLFHSPNPIVHSQTSTTSSEQMQPPMFHSQSTIAVLQGSSVPQDQQSTNIFLSQSPMNNLQTNTVAQEAFFAAPNSISPLQSTSNSEQQAAFQQQAPISHIQTPMLSQEQAQPPQQGLFQPQVALGSLPPNPMPQSQQGTMFQSQHSIVAMQSNSPSQEQQQQQQQQQQQQQQQQQSILFSNQNTMATMASPKQPPPNMIFNPNQNPMANQEQQNQSIFHQQSNMAPMNQEQQPMQFQSQSTVSSLQNPGPTQSESSQTPLFHSSPQIQLVQGSPSSQEQQVTLFLSPASMSALQTSINQQDMQQSPLYSPQNNMPGIQGATSSPQPQATLFHNTAGGTMNQLQNSPGSSQQTSGMFLFGIQNNCSQLLTSGPATLPDQLMAISQPGQPQNEGQPPVTTLLSQQMPENSPLASSINTNQNIEKIDLLVSLQNQGNNLTGSF

SEQ ID NO: 1895 - protein, 5636 aa, Homo sapiens
  VARIANT 3003, 3041, 3367: Xaa = Any Amino Acid
MISWEVVHTVFLFALLYSSLAQDASPQSEIRAEEFPEGASTLAFVFDVTGSMYDDLVQVIEGASKILETSLKRPKRPLFNFALVPFHDPEIGPVTITTDPKKFQYELRELYVQGGGDCPEMSIGAIKIALEISLPGSFIYVFTDARSKDYRLTHEVLQLIQQKQSQVVFVLTGDCDDRTHIGYKVYEEIASTSSGQVFHLDKKQVNEVLKWVEEAVQASKVHLLSTDHLEQAVNTWRIPFDPSLKEVTVSLSGPSPMIEIRNPLGKLIKKGFGLHELLNIHNSAKVVNVKEPEAGMWTVKTSSSGRHSVRITGLSTIDFRAGFSRKPTLDFKKTVSRPVQGIPTYVLLNTSGISTPARIDLLELLSISGSSLKTIPVKYYPHRKPYGIWNISDFVPPNEAFFLKVTGYDKDDYLFQRVSSVSFSSIVPDAPKVTMPEKTPGYYLQPGQIPCSVDSLLPFTLSFVRNGVTLGVDQYLKESASVSLDIAKVTLSDEGFYECIAVSSAGTGRAQTFFDVSEPPPVIQVPNNVTVTPGERAVLTCLIISAVDYNLTWQRNDRDVRLAEPARIRTLANLSLELKSVKFNDAGEYHCMVSSEGGSSAASVFLTVQEPPKVTVMPKNQSFTGGSEVSIMCSATGYPKPKIAWTVNDMFIVGSHRYRMTSDGTLFIKNAAPKDAGIYGCLASNSAGTDKQNSTLRYIEAPKLMVVQSELLVALGDITVMECKTSGIPPPQVKWFKGDLELRPSTFLIIDPLLGLLKIQETQDLDAGDYTCVAINEAGRATGKITLDVGSPPVFIQEPADVSMEIGSNVTLPCYVQGYPEPTIKWRRLDNMPIFSRPFSVSSISQLRTGALFILNLWASDKGTYICEAENQFGKIQSETTVTVTGLVAPLIGISPSVANVIEGQQLTLPCTLLAGNPIPERRWIKNSAMLLQNPYITVRSDGSLHIERVQLQDGGEYTCVASNVAGTNNKTTSVVVHVLPTIQHGQQILSTIEGIPVTLPCKASGNPKPSVIWSKKGELISTSSAKFSAGADGSLYVVSPEGEESGEYVCTATNTAGYAKRKVQLTVYVRPRVFGDLRGLSQDKPVEISVLAGEEVTLPCEVKSLPPPIITWAKETQLISPFSPRHTFLPSGSMKITETRTSDSGMYLCVATNIAGNVTQAVKLNVHVPPKIQRGPKHLKVQVGQRVDIPCNAQGTPLPVITWSKGGSTMLVDGEHHVSNPDGTLSIDQATPSDAGIYTCVATNIAGTDETEITLHVQEPPTVEDLEPPYNTTFQERVANQRIEFPCPAKGTPKPTIKWLHNGRELTGREPGISILEEGTLLVIASVTPYDNGEYICVAVNEAGTTERKYNLKVHVPPVIKDKEQVSNVSVLLNQLTNLFCEVEGTPSPIIMWYKDNVQVTESSTIQTVNNGKILKLFRATPEDAGRYSCKAINIAGTSQKYFNIDVLVPPTIIGTNFPKEVSVVLNRDVALECQVKGTPFPDIHWFKDGKPLFLGDPNVELLDRGQVLHLKNARRNDKGRYQCTVSNAAGKQAKDIKLTIYIPPSIKGGNVTTDISVLINSLIKLECKTRGLPMPAITWYKDGQPIMSSSQALYIDKGQYLHIPRAQVSDSATYTCHVANVAGTAEKSFHVDVYVPPMIEGNLATPLNKQVVIAHSLTLECNAAGNPSPILTWLKDGVPVKANDNFRIEAGGKKLEIMSAQEIDRGQYICVATSVAGEKEIKYEVDVLVPPAIEGGDETSYFIVMVNNLLELDCHVTGSPPPTIMWLKDGQLIDERDGFKILLNGRKLVIAQAQVSNTGLYRCMAANTAGDHKKEFEVTVHVPPTIKSSGLSERVVVKYKPVALQCIANGIPNPSITWLKDDQPVNTAQGNLKIQSSGRVLQIAKTLLEDAGRYTCVATNAAGETQQHIQLHVHEPPSLEDAGKMLNETVLVSNPVQLECKAAGNPVPVITWYKDNCLLSGSTSMTFLNRGQIIDIESAQISDAGIYKCVAINSAGATELFYSLQVHVAPSISGSNNMVAVVVNNPVRLECEARGIPAPSLTWLKDGSPVSSFSNGLQVLSGGRILALTSTQISDTGRYTCVAVNAAGEKQRDIDLRVYVPPNIMGEEQNVSVLISQAVELLCQSDAIPPPTLTWLKDGHPLLKKPGLSISENRSVLKIEDAQVQDTGRYTCEATNVAGKTEKKNYNVNIWVPPNIGGSDELTQLTVIEGNLISLLCESSGIPPPNLIWKKKGSPVLTDSMGRVRILSGGRQLQISIAEKSDAALYSCVASNVAGTAKKEYNLQVYIRPTITNSGSHPTEIIVTRGKSISLECEVQGIPPPTVTWMKDGHPLIKAKGVEILDEGHILQLKNIHVSDTGRYVCVAVNVAGMTDKKYDLSVHAPPSIIGNHRSPENISVVEKNSVSLTCEASGIPLPSTTWFKDGWPVSLSNSVRILSGGRMLRLMQTTMEDAGQYTCVVRNAAGEERKIFGLSVLVPPHIVGENTLEDVKVKEKQSVTLTCEVTGNPVPEITWHKDGQPLQEDEAHHIISGGRFLQITNVQVPHTGRYTCLASSPAGHKSRSFSLNVFVSPTIAGVGSDGNPEDVTVILNSPTSLVCEAYSYPPATITWFKDGTPLESNRNIRILPGGRTLQILNAQEDNAGRYSCVATNEAGEMIKHYEVKVYIPPIINKGDLWGPGLSPKEVKIKVNNTLTLECEAYAIPSASLSWYKDGQPLKSDDHVNIAANGHTLQIKEAQISDTGRYTCVASNIAGEDELDFDVNIQVPPSFQKLWEIGNMLDTGRNGEAKDVIINNPISLYCETNAAPPPTLTWYKDGHPLTSSDKVLILPGGRVLQIPRAKVEDAGRYTCVAVNEAGEDSLQYDVRVLVPPIIEGANSDLPEEVTVLVNKSALIECLSSGSPAPRNSWQKDGQPLLEDDHHKFLSNGRILQILNTQITDIGRYVCVAENTAGSAKKYFNLNVHVPPSVIGPKSENLTVVVNNFISLTCEVSGFPPPDLSWLKNXQPIKLNTNTLIVPGGRTLQIIRAKVSDGGEYTCIAINXAGESKKKFSLTVYVPPSIKDHDSESLSVVNVREGTSVSLECESNAVPPPVITWYKNGRMITESTHVEILADGQMLHIKKAEVSDTGQYVCRAINVAGRDDKNFHLNVYVPPSIEGPEREVIVETISNPVTLTCDATGIPPPTIAWLKNYKRIENSDSLEVRILSGGSKLQIARSQHSDSGNYTCIASNMEGKAQKYYFLSIQVPPSVAGAEIPSDVSVLLGENVELVCNANGIPTPLIQWLKDGKPIASGETERIRVSANGSTLNIYGALTSDTGKYTCVATNPAGEEDRIFNLNVYVTPTIRGNKDEAEKLMTYVDTSINIECRXTGTPPPQINWLKNGLPLPLSSHIRLLAAGQVIRIVRAQVSDVAVYTCVASNRAGVDNKHYNLQVFAPPNMDNSMGTEEITVLKGSSTSMACITDGTPAPSMAWLRDGQPLGLDAHLTVSTHGMVLQLLKAETEDSGKYTCIASNEAGEVSKHFILKVLEPPHINGSEEHEEISVIVNNPLELTCIASGIPAPKMTWMKDGRPLPQTDQVQTLGGGEVLRISTAQVEDTGRYTCLASSPAGDDDKEYLVRVHVPPNIAGTDEPRDITVLRNRQVTLECKSDAVPPPVITWLRNGERLQATPRVRILSGGRYLQINNADLGDTANYTCVASNIAGKTTREFILTVNVPPNIKGGPQSLVILLNKSTVLECIAEGVPTPRITWRKDGAVLAGNHARYSILENGFLHIQSAHVTDTGRYLCMATNAAGTDRRRIDLQVHVPPSIAPGPTNMTVIVNVQTTLACEATGIPKPSINWRKNGHLLNVDQNQNSYRLLSSGSLVIISPSVDDTATYECTVTNGAGDDKRTVDLTVQVPPSIADEPTDFLVTKHAPAVITCTASGVPFPSIHWTKNGIRLLPRGDGYRILSSGAIEILATQLNHAGRYTCVARNAAGSAHRHVTLHVHEPPVIQPQPSELHVILNNPILLPCEATGTPSPFITWQKEGINVNTSGRNHAVLPSGGLQISRAVREDAGTYMCVAQNPAGTALGKIKLNVQVPPVISPHLKEYVIAVDKPITLSCEADGLPPPDITWHKDGRAIVESIRQRVLSSGSLQIAFVQPGDAGHYTCMAANVAGSSSTSTKLTVHVPPRIRSTEGHYTVNENSQAILPCVADGIPTPAINWKKDNVLLANLLGKYTAEPYGELILENVVLEDSGFYTCVANNAAGEDTHTVSLTVHVLPTFTELPGDVSLNKGEQLRLSCKATGIPLPKLTWTFNNNIIPAHFDSVNGHSELVIERVSKEDSGTYVCTAENSVGFVKATGFVYVKEPPVFKGDYPSNWIEPLGGNAILNCEVKGDPTPTIQWNRKGVDIEISHRIRQLGNGSLAIYGTVNEDAGDYTCVATNEAGVVERSMSLTLQSPPIITLEPVETVINAGGKIILNCQATGEPQPTITWSRQGHSISWDDRVNVLSNNSLYIADAQKEDTSEFECVARNLMGSVLVRVPVIVQVHGGFSQWSAWRACSVTCGKGIQKRSRLCNQPLPANGGKPCQGSDLEMRNCQNKPCPVDGSWSEWSLWEECTRSCGRGNQTRTRTCNNPSVQHGGRPCEGNAVEIIMCNIRPCPVHGAWSAWQPWGTCSESCGKGTQTRARLCNNPPPAFGGSYCDGAETQMQVCNERNCPIHGKWATWASWSACSVSCGGGARQRTRGCSDPVPQYGGRKCEGSDVQSDFCNSDPCPTHGNWSPWSGWGTCSRTCNGGQMRRYRTCDNPPPSNGGRACGGPDSQIQRCNTDMCPVDGSWGSWHSWSQCSASCGGGEKTRKRLCDHPVPVKGGRPCPGDTTQVTRCNVQACPGGPQRARGSVIGNINDVEFGIAFLNATITDSPNSDTRIIRAKITNVPRSLGSAMRKIVSILNPIYWTTAKEIGEAVNGFTLTNAVFKRETQVEFATGEILQMSHIARGLDSDGSLLLDIVVSGYVLQLQSPAEVTVKDYTEDYIQTGPGQLYAYSTRLFTIDGISIPYTWNHTVFYDQAQGRMPFLVETLHASSVESDYNQIEETLGFKIHASISKGDRSNQCPSGFTLDSVGPFCADEDECAAGNPCSHSCHNAMGTYYCSCPKGLTIAADGRTCQDIDECALGRHTCHAGQDCDNTIGSYRCVVRCGSGFRRTSDGLSCQDINECQESSPCHQRCFNAIGSFHCGCEPGYQLKGRKCMDVNECRQNVCRPDQHCKNTRGGYKCIDLCPNGMTKAENGTCIDIDECKDGTHQCRYNQICENTRSSYRCVCPRGYRSQGVGRPCMDIDECEQVPKPCAHQCSNTPGSFKCICPPGQHLLGDGKSCAGLERLPNYGTQYSSYNLARFSPVRNNYQPQQHYRQYSHLYSSYSEYRNSRTSLSRTRRTIRKTCPEGSEASHDTCVDIDECENTDACQHECKNTFGSYQCICPPGYQLTHNGKTCQDIDECLEQNVHCGPNRMCFNMRGSYQCIDTPCPPNYQRDPVSGFCLKNCPPNDLECALSPYALEYKLVSLPFGIATNQDLIRLVAYTQDGVMHPRTTFLMVDEEQTVPFALRDENLKGVVYTTRPLREAETYRMRVRASSYSANGTIEYQTTFIVYIAVSAYPY

SEQ ID NO: 1896 - protein, 303 aa, Homo sapiens [sequence omitted]

SEQ ID NO: 1897 - protein, 721 aa, Homo sapiens
GTRLNLSCADVVWHQMDENLLATAATNGVVVTWNLGRPSRNKQDQLFTEHKRTVNKVCFHPTEAHVLLSGSQDGFMKCFDLRRKDSVSTFSGQSESVRDVQFSIRDYFTFASTFENGNVQLWDIRRPDRCERMFTAHNGPVFCCDWHPEDRGWLATGGRDKMVKVWDMTTHRAKEMHCVQTIASVARVKWRPECRHHLATCSMMVDHNIYVWDVRRPFVPAAMFEEHRDVTTGIAWRHPHDPSFLLSGSKDSSLCQHLFRDASQPVERANPEGLCYGLFGDLAFAAKESLVAAESGRKPYTGDRRHPIFFKRKLDPAEPFAGLASSALSVFETEPGGGGMRWFVDTAERYALAGRPLAELCDHNAKVARELGRNQVAQTWTMLRIIYCSPGLVPTANLNHSVGKGGSCGLPLMNSFNLKDMAPGLGSETRLDRSKGDARSDTVLLDSSATLITNEDNEETEGSDVPADYLLGDVEGEEDELYLLDPEHAHPEDPECVLPQEAFPLRHEIVDTPPGPEHLQDKADSPHVSGSEADVASLAPVDSSFSLLSVSHALYDSRLPPDFFGVLVRDMLHFYAEQGDVQMAVSVLIVLGERVRKDIDEQTQEHWYTSYIDLLQRFRLWNVSNEVVKLSTSRAVSCLNQASTTLHVNCSHCKRPMSSRGWVCDRCHRCASMCAVCHHVVKGLFVWCQGCSHGGHLQHIMKWLEGSSHCPAGCGHLCEYS

SEQ ID NO: 1898 - protein, 128 aa, Homo sapiens
HEDHPDKNPDNPEAADKFKEINNAHAILTDATKRNIYDKYGSLGLYVAEQFGEENVNTYFVLSSWWAKALFVFCGLLTCCYCCCCLCCCFNCCCGKCKPKAPEGEETEFYVSPEDLEAQLQSDERGGH

SEQ ID NO: 1899 - protein, 39 aa, Homo sapiens
RGGRPRGKLEARVGNMSESELGRKWDRCLADAVVKIESW

SEQ ID NO: 1900 - protein, 583 aa, Homo sapiens
HEGHWLPAARGRLEQLGGLLANVSGELGGRLDLLEEQVAGAMQACGQLCSGAPGEQDSQVSEILSALERRVLDSEGQLRLVGSGLHTVEAAGEARQATLEGLQEVVGRLQDRVDAQDETAAEFTLRLNLTAARLGQLEGLLQAHGDEGCGACGGVQEELGRLRDGVERCSCPLLPPRGPGAGPGVGGPSRGPLDGFSVFGGSSGSALQALQGELSEVILSFSSLNDSLNELQTTVEGQGADLADLGATKDRIISEINRLQQEATEHATESEERFRGLEEGQAQAGQCPSLEGRLGRLEGVCERLDTVAGGLQGLREGLSRHVAGLWAGLRETNTTSQMQAALLEKLVGGQAGLGRRLGALNSSLQLLEDRLHQLSLKDLTGPAGEAGPPGPPGLQGPPGPAGPPGSPGKDGQEGPIGPPGPQGEQGVEGAPAAPVPQVAFSAALSLPRSEPGTVPFDRVLLNDGGYYDPETGVFTAPLAGRYLLSAVLTGHRHEKVEAVLSRSNQGVARVDSGGYEPEGLENKPVAESQPSPGTLGVFSLILPLQAGDTVCVDLVMGQLAHSEEPLTIFSGALLYGDPELEHA

SEQ ID NO: 1901 - protein, 575 aa, Homo sapiens [sequence omitted]

SEQ ID NO: 1902 - protein, 536 aa, Homo sapiens
MRDSTGAGNSLVHKRSPLRRNQKTPTSLTKLSLQDGHKAKKPACKFEEGQDVLARWSDGLFYLGTIKKINILKQSCFIIFEDSSKSWVLWKDIQTGATGSGEMVCTICQEEYSEAPNEMVICDKCGQGYHQLCHTPHIDSSVIDSDEKWLCRQCVFATTTKRGGALKKGPNAKALQVMKQTLPYSVADLEWDAGHKTNVQQCYCYCGGPGDWYLKMLQCCKCKQWFHEACVQCLQKPMLFGDRFYTFICSVCSSGPEYLKRLPLQWVDIAHLCLYNLSVIHKKKYFDSELELMTYINENWDRLHPGELADTPKSERYEHVLEALNDYKTMEVSNGIEKKGKKKSVGRPPGPYTRKMIQKTAEPLLDKESISENPTLDLPCSIGRTEGTAHSSNTSDVDFTGASSAKETTSSSISRHYGLSDSRKRTRTGRSWPAAIPHLRRRRGRLPRRALQTQNSEIVKDDEGKEDYQFDELNTEILNNLADQELQLNHLKNSITSYFGAAGRIACGEKYRVLARRVTLDGKVQYLVEWEGATAS

SEQ ID NO: 1903 - protein, 563 aa, Homo sapiens [sequence omitted]

SEQ ID NO: 1904 - protein, 356 aa, Homo sapiens [sequence omitted]

SEQ ID NO: 1905 - protein, 687 aa, Homo sapiens
MERVNDASCGPSGCYTYQVSRHSTEMLHNLNQQRKNGGRFCDVLLRVGDESFPAHRAVLAACSEYFESVFSAQLGDGGAADGGPADVGGATAAPGGGAGGSRELEMHTISSKVFGDILDFAYTSRIVVRLESFPELMTAAKFLLMRSVIEICQEVIKQSNVQILVPPARADIMLFRPPGTSDLGFPLDMTNGAALAANSNGIAGSMQPEEEAARAAGAAIAGQASLPVLPGVDRLPMVAGPLSPQLLTSPFPSVASSAPPLTGKRGRGRPRKANLLDSMFGSPGGLREAGILPCGLCGKVFTDANRLRQHEAQHGVTSLQLGYIDLPPPRLGENGLPISEDPDGPRKRSRTRKQVACEICGKIFRDVYHLNRHKLSHSGEKPYSCPVCGLRFKRKDRMSYHVRSHDGSVGKPYICQSCGKGFSRPDHLNGHIKQVHTSERPHKCQTCNASFATRDRLRSHLACHEDKVPCQVCGKYLRAAYMADHLKKHSEGPSNFCSICNRGFSSASYLKVHVKTHHGVPLPQVSRHQEPILNGGAAFHCARTYGNKEGQKCSHQDPIESSDSYGDLSDASDLKTPEKQSANGSFSCDMAVPKNKMESDGEKKYPCPECGSFFRSKSYLNKHIQKVHVRALGGPLGDLGPALGSPFSPQQNMSLLESFGFQIVQSAFASSLVDPEVDQQPMGPEGK

SEQ ID NO: 1906 - protein, 387 aa, Homo sapiens
MDMNSFSPMMPTSPLSMINQIKFEDEPDLKDLFITVDEPESHVTTIETFITYRIITKTSRGEFDSSEFEVRRRYQDFLWLKGKLEEAHPTLIIPPLPEKFIVKGMVERFNDDFIETRRKALHKFLNRIADHPTLTFNEDFKIFLTAQAWELSPHKKQGPGLLSRMGQTVRAVASSMRGVKNRPEEFMEMNNFIELFSQKINLIDKISQRIYKEEREYFDEMKEYGPIHILWSASEEDLVDTLKDVASCIDRCCKATEKRMSGLSEALLPVVHEYVLYSEMLMGVMKRRDQIQAELDSKVEVLTYKKADTDLLPEEIGKLEDKVECANNALKADWERWKQNMQNDIKLAFTDMAEENIHYYEQCLATWESFLTSQTNLHLEEASEDKP

SEQ ID NO: 1907 - protein, 501 aa, Homo sapiens
MAASWRLGCDPRLLRYLVGFPGRRSVGLVKGALGWSVSRGANWRWFHSTQWLRGDPIKILMPSLSPTMEEGNIVKWLKKEGEAVSAGDALCEIETDKAVVTLDASDDGILAKIVVEEGSKNIRLGSLIGLIVEEGEDWKHVEIPKDVGPPPPVSKPSEPRPSPEPQISIPVKKEHIPGTLRFRLSPAARNILEKHSLDASQGTATGPRGIFTKEDALKLVQLKQTGKITESRPTPAPTATPTAPSPLQATAGPSYPRPVIPPVSTPGQPNAVGTFTEIPASNIRRVIAKRLTESKSTVPHAYATADCDLGAVLKVRQDLVKDDIKVSVNDFIIKAAAVTLKQMPDVNVSWDGEGPKQLPFIDISVAVATVKGLLTPIIKDAAAKGIQEIADSVKALSKKARDGKLLPEEYQGGSFSISNLGMFGIDEFTAVINPPQACILAVGRFRPVLKLTEDEEGNAKLQQRQLITVTMSSDSRVVDDELATRFLKSFKANLENPIRLA

SEQ ID NO: 1908 - protein, 490 aa, Homo sapiens
MAAAAARVVLSSAARRRLWGFSESLLIRGAAGRSLYFGENRLRSTQAATQVVLNVPETRVTCLESGLRVASEDSGLSTCTVGLWIDAGSRYENEKNNGTAHFLEHMAFKGTKKRSQLDLELEIENMGAHLNAYTSREQTVYYAKAFSKDLPRAVEILADIIQNSTLGEAEIERERGVILREMQEVETNLQEVVFDYLHATAYQNTALGRTILGPTENIKSISRKDLVDYITTHYKGPRIVLAAAGGVSHDELLDLAKFHFGDSLCTHKGEIPALPPCKFTGSEIRVRDDKMPLAHLAIAVEAVGWAHPDTICLMVANTLIGNWDRSFGGGMNLSSKLAQLTCHGNLCHSFQSFNTSYTDTGLWGLYMVCESSTVADMLHVVQKEWMRLCTSVTESEVARARNLLKTNMLLQLDGSTPICEDIGRQMLCYNRRIPIPELEARIDAVNAETIREVCTKYIYNRSPAIAAVGKPGFFSSMQKVGQVLLINSSF

SEQ ID NO: 1909 - protein, 759 aa, Homo sapiens
TLAAGSISMAEVMQHPSEGGQVLSLCSSIKEAPVKAAEIWIASLSSQPIDHEDSTMQAGPKAKSTDNYSEEEYESFSSEQEASDDAVQGQDLDEDDFDVGKPKKQRRSIVRTTSMTRQQNFKQKVVALLRRFKVSDEVLDSEQDPAEHIPEAEEDLDLLYDTLDMEHPSDSGPDMEDDDSVLSTPKPKLRPYFEGLSHSSSQTEIGSIHSARSHKEPPSPADVPEKTRSLGGRQPSDSVSDTVALGVPGPREHPGQPEDSPEAEASTLDVFTERLPPSGRITKTESLVIPSTRSEGKQAGRRGRSTSLKERQAARPQNERANSLDNERCPDARSQLQIPRKTVYDQLNHILISDDQLPENIILVNTSDWQGQFLSDVLQRHTLPVVCTCSPADVQAAFSTIVSRIQRYCNCNSQPPTPVKIAVAGAQHYLSAILRLFVEQLSHKTPDWLGYMRFLVIPLGSHPVARYLGSVDYRYNNFFQDLAWRDLFNKLEAQSAVQDTPDIVSRITQYIAGANCAHQLPIAEAMLTYKQKSPDEESSQKFIPFVGVVKVGIVEPSSATSGDSDDAAPSGSGTLSSTPPSASPAAKEASPTPPSSPSVSGGLSSPSQGVGAELMGLQVDYWTAAQPADRKRDAEKKDLPVTKNTLKCTFRSLQVSRLPSSGEAAATPTMSMTVVTKEKNKKVMFLPKKAKDKDVESKSQCIEGISRLICTARQQQNMLRVLIDGVECSDVKFFQLAAQWSSHVKHFPICIFGHSKATF

SEQ ID NO: 1910 - protein, 166 aa, Homo sapiens
MASGVTVNDEVIKVFNDMKVRKSSTQEEIKKRKKAVLFCLSDDKRQIIVEEAKQILVGDIGDTVEDPYTSFVKLLPLNDCRYALYDATYETKESKKEDLVFIFWAPESAPLKSKMIYASSKDAIKKKFTGIKHEWQVNGLDDIKDRSTLGEKLGGNVVVSLEGKPL

SEQ ID NO: 1911 - protein, 559 aa, Homo sapiens
MATALSEEELDNEDYYSLLNVRREASSEELKAAYRRLCMLYHPDKHRDPELKSQAERLFNLVHQAYEVLSDPQTRAIYDIYGKRGLEMEGWEVVERRRTPAEIREEFERLQREREERRLQQRTNPKGTISVGVDATDLFDRYDEEYEDVSGSSFPQIEINKMHISQSIEAPLTATDTAILSGSLSTQNGNGGGSINFALRRVTSAKGWGELEFGAGDLQGPLFGLKLFRNLTPRCFVTTNCALQFSSRGIRPGLTTVLARNLDKNTVGYLQWRWGIQSAMNTSIVRDTKTSHFTVALQLGIPHSFALISYQHKFQDDDQTRVKGSLKAGFFGTVVEYGAERKISRHSVLGAAVSVGVPQGVSLKVKLNRASQTYFFPIHLTDQLLPSAMFYATVGPLVVYFAMHRLIIKPYLRAQKEKELEKQRESAATDVLQKKQEAESAVRLMQESVRRIIEAEESRMGLIIVNAWYGKFVNDKSRKSEKVKVIDVTVPLQCLVKDSKLILTEASKAGLPGFYDPCVGEEKNLKVLYQFRGVLHQVMVLDSEALRIPKQSHRIDTDG

SEQ ID NO: 1912 - protein, 109 aa, Homo sapiens
MVWNTDLVETLELQNLMLCALQTVNGAEAGKESRGAHAGEDYKVRIDEYDHSKPIQGQQKKPFEEHWRKHTLSYVDVSTGKVTVEYRPIIDKTLNEADCATVPPAIHSY

SEQ ID NO: 1913 - protein, 304 aa, Homo sapiens
MAPRRVRSFLRGLPALLLLLLFLGPWPAASHGGKYSREKNQPKPSPKRESGEEFRMEKLNQLWEKAQRLHLPPVRLAELHADLKIQERDELAWKKLKLDGLDEDGEKEARLIRNLNVILAKYGLDGKKDARQVTSNSLSGTQEDGLDDPRLEKLWHKAKTSGKFSGEELDKLWREFLHHKEKVHEYNVLLETLSRTEEIHENVISPSDLSDIKGSVLHSRHTELKEKLRSINQGLDRLRRVSHQGYSTEAEFEEPRVIDLWDLAQSANSRTRSWRRSGRSSSTSKPKSRSTTTTRSSWRLRTRS

SEQ ID NO: 1914 - protein, 571 aa, Homo sapiens
MDRSKRNSIAGFPPRVERLEEFEGGGGGEGNVSQVGRVWPSSYRALISAFSRLTRLDDFTCEKIGSGFFSEVFKVRHRASGQVMALKMNTLSSNRANMLKEVQLMNRLSHPNILRFMGVCVHQGQLHALTEYINSGNLEQLLDSNLHLPWTVRVKLAYDIAVGLSYLHFKGIFHRDLTSKNCLIKRDENGYSAVVADFGLAEKIPDVSMGSEKLAVVGSPFWMAPEVLRDEPYNEKADVFSYGIILCEIIARIQADPDYLPRTENFGLDYDAFQHMVGDCPPDFLQLTFNCCNMDPKLRPSFVEIGKTLEEILSRLQEEEQERDRKLQPTARGLLEKAPGVKRLSSLDDKIPHKSPCPRRTIWLSRSQSDIFSRKPPRTVSVLDPYYRPRDGAARTPKVNPFSARQDLMGGKIKFFDLPSKSVISLVFDLDAPGPGTMPLADWQEPLAPPIRRWRSLPGSPEFLHQEACPFVGREESLSDGPPPRLSSLKYRVKEIPPFRASALPAAQAHEAMDCSILQEENGFGSRPQGTSPCPAGASEEMEVEERPAGSTPATFSTSGIGLQTQGKQDG

SEQ ID NO: 1915 - protein, 154 aa, Homo sapiens
MGSLSGLRLAAGSCFRLCERDVSSSLRLTRSSDLKRINGFCTKPQESPGAPSRTYNRVPLHKPTDWQKKILIWSGRFKKEDEIPETVSLEMLDAAKNKMRVKISYLMIALTVVGCIFMVIEGKKAAQRHETLTSLNLEKKARLKEEAAMKAKTE

SEQ ID NO: 1916 - protein, 970 aa, Homo sapiens
MATCIGEKIEDFKVGNLLGKGSFAGVYRAESIHTGLEVAIKMIDKKAMYKAGMVQRVQNEVKIHCQLKHPSILELYNYFEDSNYVYLVLEMCHNGEMNRYLKNRVKPFSENEARHFMHQIITGMLYLHSHGILHRDLTLSNLLLTRNMNIKIADFGLATQLKMPHEKHYTLCGTPNYISPEIATRSAHGLESDVWSLGCMFYTLLIGRPPFDTDTVKNTLNKVVLADYEMPSFLSIEAKDLIHQLLRRNPADRLSLSSVLDHPFMSRNSSTKSKDLGTVEDSIDSGHATISTAITASSSTSISGSLFDKRRLLIGQPLPNKMTVFPKNKSSTDFSSSGDGNSFYTQWGNQETSNSGRGRVIQDAEERPHSRYLRRAYSSDRSGTSNSQSQAKTYTMERCHSAEMLSVSKRSGGGENEERYSPTDNNANIFNFFKEKTSSSSGSFERPDNNQALSNHLCPGKTPFPFADPTPQTETVQQWFGNLQINAHLRKTTEYDSISPNRDFQGHPDLQKDTSKNAWTDTKVKKNSDASDNAHSVKQQNTMKYMTALHSKPEIIQQECVFGSDPLSEQSKTRGMEPPWGYQNRTLRSITSPLVAHRLKPIRQKTKKAVVSILDSEEVCVELVKEYASQEYVKEVLQISSDGNTITIYYPNGGRGFPLADRPPSPTDNISRYSFDNLPEKYWRKYQYASRFVQLVRSKSPKITYFTRYAKCILMENSPGADFEVWFYDGVKIHKTEDFIQVIEKTGKSYTLKSESEVNSLKEEIKMYMDHANEGHRICLALESIISEEERKTRSAPFFPIIIGRKPGSTSSPKALSPPPSVDSNYPTRERASFNRMVMHSAASPTQAPILNPSMVTNEGLGLTTTASGTDISSNSLKDCLPKSAQLLKSVFVKNVGWATQLTSGAVWVQFNDGSQLVVQAGVSSISYTSPNGQTTRYGENEKLPDYIKQKLQCLSSILLMFSNPTPNFH

SEQ ID NO: 1917 - protein, 470 aa, Homo sapiens
MGQNLILNMNDHGFVVCAFNRTVSKVDDFLANEAKGTKVVGAQSLKEMVSKLKKPRRIILLVKAGQAVDDFIEKLVPLLDTGDIIIDGGNSEYRDTTRRCRDLKAKGILFVGSGVSGGEEGARYGPSLMPGGNKEAWPHIKTIFQGIAAKVGTGEPCCDWVGDEGAGHFVKMVHNGIEYGDMQLICEAYHLMKDVLGMAQDEMAQAFEDWNKTELDSFLIEITANILKFQDTDGKHLLPKIRDSAGQKGTGKWTAISALEYGVPVTLIGEAVFARCLSSLKDERIQASKKLKGPQKFQFDGDKKSFLEDIRKALYASKIISYAQGFMLLRQAATEFGWTLNYGGIALMWRGGCIIRSVFLGKIKDAFDRNPELQNLLLDDFFKSAVENCQDSWRRAVSTGVQAGIPMPCFTTALSFYDGYRHEMLPASLIQAQRDYFGAHTYELLAKPGQFIHTNWTGHGGTVSSSSYNA

SEQ ID NO: 1918 - protein, 570 aa, Homo sapiens
MDREVKEQYQVLIQAKDMGGQLGGLAGTTIVNITLTDVNDNPPRFPKSIFHLKVPESSPIGSAIGRIRAVDPDFGQNAEIEYNIVPGDGGNLFDIVTDEDTQEGVIKLKKPLDFETKKAYTFKVEASNLHLDHRFHSAGPFKDTATVKISVLDVDEPPVFSKPLYTMEVYEDTPVGTIIGAVTAQDLDVGSSAVRYFIDWKSDGDSYFTIDGNEGTIATNELLDRESTAQYNFSIIASKVSNPLLTSKVNILINVLDVNEFPPEISVPYETAVCENAKPGQIIQIVSAADRDLSPAGQQFSFRLSPEAAIKPNFTVRDFRNNTAGIETRRNGYSRRQQELYFLPVVIEDSSYPVQSSTNTMTIRVCRCDSDGTILSCNVEAIFLPVGLSTGALIAILLCIVILLAIVVLYVALRRQKKKDTLMTSKEDIRDNVIHYDDEGGGEEDTQAFDIGALRNPKVIEENKIRRDIKPDSLCLPRQRPPMEDNTDIRDFIHQRLQENDVDPTAPPYDSLATYAYEGSGSVAESLSSIDSLTTEADQDYDYLTDWGPRFKVLADMFGEEESYNPDKVT

SEQ ID NO: 1919 - protein, 343 aa, Homo sapiens
MLATRLSRPLSRLPGKTLSACDRENGARRPLLLGSTSFIPIGRRTYASAAEPVGSKAVLVTGCDSGFGFSLAKHLHSKGFLVFAGCLMKDKGHDGVKELDSLNSDRLRTVQLNVCSSEEVEKVVEIVRSSLKDPEKGMWGLVNNAGISTFGEVEFTSLETYKQVAEVNLWGTVRMTKSFLPLIRRAKGRVVNISSMLGRMANPARSPYCITKFGVEAFSDCLRYEMYPLGVKVSVVEPGNFIAATSLYSPESIQAIAKKMWEELPEVVRKDYGKKYFDEKIAKMETYCSSGSTDTSPVIDAVTHALTATTPYTRYHPMDYYWWLRMQIMTHLPGAISDMIYIR

SEQ ID NO: 1920 - protein, 1124 aa, Homo sapiens [sequence omitted]

SEQ ID NO: 1921 - protein, 322 aa, Homo sapiens
MYYPVTLDVLHQIFSKFGAVLKIITFTKNNQFQALLQYGDPVNAQQAKLALDGQNIYNACCTLRIDFSKLVNLNVKYNNDKSRDYTRPDLPSGDGQPALDPAIAAAFAKETSLLAVPGALSPLAIPNAAAAAAAAAAGRVGMPGVSAGGNTVLLVSNLNEEMVTPQSLFTLFGVYGDVQRVKILYNKKDSALIQMADGNQSQLAMNHLNGQKMYGKIIRVTLSKHQTVQLPREGLDDQGLTKDFGNSPLHRFKKPGSKNFQNIFPPSATLHLSNIPPSVAEEDLRTLFANTGGTVKAFNFVSEEITKWLFFRWQQWKKLFRP

SEQ ID NO: 1922 - protein, 126 aa, Homo sapiens; identical to SEQ ID NO: 1210

SEQ ID NO: 1923 - protein, 414 aa, Homo sapiens
  VARIANT 198, 199, 200, 201, 202, 203, 204, 205, 206, 207, 208, 209,210, 211, 212, 213, 214, 215, 216, 217, 218, 219, 220, 221,222, 223, 224, 225, 226, 227, 228, 229, 230, 231, 232, 233,234, 235, 236, 237: Xaa = Any Amino Acid
MAASIVRRGMLLARQVVLPQLSPAGKRYLLSSAYVDSHKWEAREKEHYCLADLASLMDKTFERKLPVSSLTISRLIDNISSREEIDHAEYYLYKFRHSPNCWYLRNWTIHTWIRQCLKYDAQDKALYTLVNKVQYGIFPDNFTFNLLMDSFIKKENYKDALSVVFEVMMQEAFEVPSTQLLSLYVLFHCLAKKTDFSXXXXXXXXXXXXXXXXXXXXXXXXXXXXXXXXXXXXXXXXQGLRAVYHNMPLIWKPGYLDRALQVMEKVAASPEDIKLCREALDVLGAVLKALTSADGASEEQSQNDEDNQGSEKLVEQLDIEETEQSKLPQYLERFKALHSKLQALGKIESEGLLSLTTQLVKEKLSTCEAEDIATYEQNLQQWHLDLVQLIQREQQQREQAKQEYQAQKAAKASA

SEQ ID NO: 1924 - protein, 67 aa, Homo sapiens [sequence omitted]

SEQ ID NO: 1925 - protein, 889 aa, Homo sapiens
  VARIANT 225, 226, 227, 228, 229, 230, 231, 232, 233, 234, 235, 236,237, 238, 239, 240, 241, 242, 243, 244, 245, 246, 247, 248,249, 250, 251, 252, 253, 254, 255, 256, 257, 258, 259, 260,261, 262, 263, 264, 497, 498, 499, 500, 501, 502, 503: Xaa = Any Amino Acid
  VARIANT 504, 505, 506, 507, 508, 509, 510, 511, 512, 513, 514, 515,516, 517, 518, 519, 520, 521, 522, 523, 524, 525, 526, 527,528, 529, 530, 531, 532, 533, 534, 535, 536, 537, 538, 539: Xaa = Any Amino Acid
MTFLFANLKDRDFLVQRISDFLQQTTSKIYSDKEFAGSYNSSDDEVYSRPSSLVSSSPQRSTSSDADGERQFNLNGNSVPTATQTLMTMYRRRSPEEFNPKLAKEFLKEQAWKIHFAEYGQGICMYRTEKTRELVLKGIPESMRGELWLLLSGAINEKATHPGYYEDLVEKSMGKYNLATEEIERDLHRSLPEHPAFQNEMGIAALRRVLTAYAFRNPNIGYCQXXXXXXXXXXXXXXXXXXXXXXXXXXXXXXXXXXXXXXXXALVDQGVFEELARDYVPQLYDCMQDLGVISTISLSWFLTLFLSVMPFESAVVVVDCFFYEGIKVIFQLALTVLDANVDKLLNCKDDGEAMTVLGRYLDSVTNKDSTLPPIPHLHSLLSDDVEPYPEVDIFRLIRTSYEKFGTIRADLIEQMRFKQRLKVIQTLEDTTKRNVVRTIVTETSFTIDELEELYALFKAEHLTSCYWGGSSNALDRHDPSLPYLEQYRIDFEQFKGXXXXXXXXXXXXXXXXXXXXXXXXXXXXXXXXXXXXXXXXXXXAACHGDLTEKLKLLYKMHVLPEPSSDQDEPDSAFEATQYFFEDITPECTHVVGLDSRSKQGADDGFVTVSLKPDKGKRANSQENRNYLRLWTPENKSKSKNAKDLPKLNQGQFIELCKTMYNMFSEDPNEQELYHATAAVTSLLLEIGEVGKLFVAQPAKEGGSGGSGPSCHQGIPGVLFPKKGPGQPYVVESVEPLPASLAPDSEEHSLGGQMEDIKLEDSSPRDNGACSSMLISDDDTKDDSSMSSYSVLSAGSHEEDKLHCEDIGEDTVLVRSGQGTAALPRSTSLDRDWAITFEQFLASLLTEPALVKYFDKPVCMMARITSAKNIRMMGKPLTSASDYEISAMSG

SEQ ID NO: 1926 - protein, 149 aa, Homo sapiens
MVFLTAQLWLRNRVTDRYFRIQEVLKHARHFRGRKNRCYRLAVRTVIRAFVKCTKARYLKKKNMRTLWINRITAASQEHGLKYPALIGNLVKCQVELNRKVLADLAIYEPKTFKSLAALASRRRHEGFAAALGDGKEPEGIFSRVVQYH

SEQ ID NO: 1927 - protein, 214 aa, Homo sapiens [sequence omitted]

SEQ ID NO: 1928 - protein, 445 aa, Homo sapiens [sequence omitted]

SEQ ID NO: 1929 - protein, 233 aa, Homo sapiens
MPVTKLGRFVKDMKIKSLEEIYVFSLPIKESEIIDSFLGASLKDEVLKIMPVQKQTRVGQRTRFKAFVAIGDYNGHVGLGVKCSKEVATATRGAIILAKLSIVPVRRGYWGNKISKPHTVPCKVTGRSGSVLVHLMPAPRGTGIVSAPVPKKLLMMAGIDDCYTSAQGCTATLGNFSKATFDAISKTYSYLTPDLWKETVFTKSPYQEFTDHLIKTHTRVSVQRTQAPAVATT

SEQ ID NO: 1930 - protein, 273 aa, Homo sapiens
MLLSPGRNVKNSDMHLLDMESMGKSYDGRAYVITGMWNPNAPVFLALNEETPKDKQVYMTVAVDMVVTEVVEPVRFLLETVVRVYPANERFWYFSRKTFTETFFMRLKQSEGKGHTNAGDAIYEVVSLQRESDKEEPVTPTSGGGPMSPQDDEAEEESDNELSSGTGDVSKDCPEKILYSWGELLGKWHSNLGARPKGLSTLVKSGVPEALRAEVWQLLAGCHDNQAMLDRYRILITKVCWSLLEVHSRPCLPGYHQWKLQNSKYCRMANVAA

SEQ ID NO: 1931 - protein, 311 aa, Homo sapiens
MLADDMACNPRNPKPATVFSHKNMELNVYGDDVEVDYRSYEVTVENFLRVLTGRIPPSTPRSKRLLSDDRSNILIYMTGHGGNGFLKFQDSEEITNIELADAFEQMWQKRRYNELLFIIDTCQGASMYERFYSPNIMALASSQVGEDSLSHQPDPAIGVHLMDRYTFYVLEFLEEINPASQTNMNDLFQVCPKSLCVSTPGHRTDLFQRDPKNVLITDFFGSVRKVEITTETIKLQQDSEIMESSYKEDQMDEKLMEPLKYAEQLPVAQIIHQKPKLKDWHPPGGFILGLWALIIMVFFKTYGIKHMKFIF

SEQ ID NO: 1932 - protein, 155 aa, Homo sapiens
MHVTIVKKHLAISQGLLSIREHTQGKNRMNVMSVENPLSISQTSGYIRELTQGKNPMNAMNVGKRFTVSHSSLSINGLTQGKNPTNAMNVGKPFAVSHSSLSIRELMLGKNHTHVTNVEKHIATSHTLQYITELTQGKNPMNVMNVENPFTVSHS

SEQ ID NO: 1933 - protein, 752 aa, Homo sapiens [sequence omitted]

SEQ ID NO: 1934 - protein, 631 aa, Homo sapiens
MFGHGLKHLFHSRRRSREREHQTSQDSQQHQQQQGMSDHDSPDEKERSPEMHRVSYAMSLHDLPARPTAFNRVLQQIRSRPSIKRGASLHSSSGGGSSGSSSRRTKSSSLEPQRGSPHLLRKAPQDSSLAAILHQHQCRPRSSSTTDTALLLADGSNVYLLAEEAEGIGDKVDKGDLVALSLPAGHGDTDGPISLDVPDGAPDPQRTKAAIDHLHQKILKITEQIKIEQEARDDNVAEYLKLANNADKQQVSRIKQVFEKKNQKSAQTIAQLHKKLEHYRRRLKEIEQNGPSRQPKDVLRDMQQGLKDVGANVRAGISGFGGGVVEGVKGSLSGLSQATHTAVVSKPREFASLIRNKFGSADNIAHLKDPLEDGPPEEAARALSGSATLVSSPKYGSDDECSSASASSAGAGSNSGAGPGGALGSPKSNALYGAPGNLDALLEELREIKEGQSHLEDSMEDLKTQLQRDYTYMTQCLQEERYRYERLEEQLNDLTELHQNEMTNLKQELASMEEKVAYQSYERARDIQEAVESCLTRVTKLELQQQQQQVVQLEGVENANARALLGKFINVILALMAVLLVFVSTIANFITPLMKTRLRITSTTLLVLVLFLLWKHWDSLTYLLEHVLLPS

SEQ ID NO: 1935 - protein, 936 aa, Homo sapiens
MGVPNSKRPYSKNTRLVQSRPCWRIHGPPLIIEGSEYWFVADLHLNYEEAVLYCASNHSFLATITSFVGLKAIKNKIANISGDGQKWWIRISEWPIDDHFTYSRYPWHRFPVTFGEECLYMSAKTWLIDLGKPTDCSTKLPFICEKYNVSSLEKYSPDSAAKVQCSEQWIPFQNKCFLKIKPVSLTFSQASDTCHSYGGTLPSVLSQIEQDFITSLLPDMEATLWIGLRWTAYEKINKWTDNRELTYSNFHPLLVSGRLRIPENFFEEESRYHCALILNLQKSPFTGTWNFTSCSERHFVSLCQKYSEVKSRQTLQNASETVKYLNNLYKIIPKTLTWHSAKRECLKSNMQLVSITDPYQQAFLSVQALLHNSSLWIGLFSQDDELNFGWSDGKRLHFSRWAETNGQLEDCVVLDTDGFWKTVDCNDNQPGAICYYSGNETEKEVKPVDSVKCPSPVLNTPWIPFQNCCYNFIITKNRHMATTQDEVHTKCQKLNPKSHILSIRDEKENNFVLEQLLYFNYMASWVMLGITYRNKSLMWFDKTPLSYTHWRAGRPTIKNEKFLAGLSTDGFWDIQTFKVIEEAVYFHQHSILACKIEMVDYKEEYNTTLPQFMPYEDGIYSVIQKKVTWYEALNMCSQSGGHLASVHNQNGQLFLEDIVKRDGFPLWVGLSSHDGSESSFEWSDGSTFDYIPWKGQTSPGNCVLLDPKGTWKHEKCNSVKDGAICYKPTKSKKLSRLTYSSRCPAAKENGSRWIQYKGHCYKSDQALHSFSEAKKLCSKHDHSATIVSIKDEDENKFVSRLMRENNNITMRVWLGLSQHSVDQSWSWLDGSEVTFVKWENKSKSGVGRCSMLIASNETWKKVECEHGFGRVVCKVPLGPDYTAIAIIVATLSILVLMGGLIWFLFQRHRLHLAGFSSVRYAQGVNEDEIMLPSFHD

SEQ ID NO: 1936 - protein, 191 aa, Homo sapiens
MGQVATDVFNSKNLAVQAQKKILGKMVSKSIATTLIDDTSSEVLDELYRVTREYTQNKKEAEKIIKNLIKTVIKLAILYRNNQFNQDELALMEKFKKKVHQLAMTVVSFHQVDYTFDRNVLSRLLNECREMLHQIIQRHLTAKSHGRVNNVFDHFSDCEFLAALYNPFGNFKPHLQKLCDGINKMLDEENI

SEQ ID NO: 1937 - protein, 269 aa, Homo sapiens [sequence omitted]

SEQ ID NO: 1938 - protein, 189 aa, Homo sapiens
MASKRALVILAKGAEEMETVIPVDVMRRAGIKVTVAGLAGKDPVQCSRDVVICPDASLEDAKKEGPYDVVVLPGGNLGAQNLSESAAVKEILKEQENRKGLIAAICAGPTALLAHEIGFGSKVTTHPLAKDKMMNGGHYTYSENRVEKDGLILTSRGPGTSFEFALAIVEALNGKEVAAQVKAPLVLKD

SEQ ID NO: 1939 - protein, 292 aa, Homo sapiens
MHSDAAAVNFQLNSHLSTLANIHKIYHTLNKLNLTEDIGQDDHQTGSLRSCSSSDCFNKVMPPRKKRRPASGDDLSAKKSRHDSMYRKYDSTRIKTEEEAFSSKRCLEWFYEYAGTDDVVGPEGMEKFCEDIGVEPENVVMLVLAWKLDAQNMGYFTLQEWLKGMTSLQCDTTEKLRNTLDYLRSFLNDSTNFKLIYRYAFDFAREKDQRSLDINTAKCMLGLLLGKIWPLFPVFHQFLEQSKYKVINKDQWCNVLEFSRTINLDLSNYDEDGAWPVLLDEFVEWYKDKQMS

SEQ ID NO: 1940 - protein, 425 aa, Homo sapiens
MAAGFGRCCRCSLQVLRSISRFHWRSQHTKANRQREPGLGFSFEFTEQQKEFQATARKFAREEIIPVAAEYDKTGEYPVPLIRRAWELGLMNTHIPENCGGLGLGTFDACLISEELAYGCTGVQTAIEGNSLGQMPIIIAGNDQQKKKYLGRMTEEPLMCAYCVTEPGAGSDVAGIKTKAEKKGDEYIINGQKMWITNGGKANWYFLLARSDPDPKAPANKAFTGFIVEADTPGIQIGRKELNMGQRCSDTRGIVFEDVKVPKENVLIGDGAGFKVAMGAFDKTRPVVAAGAVGLAQRALDEATKYALERKTFGKLLVEHQAISFMLAEMAMKVELARMSYQRAAWEVDSGRRNTYYASIAKAFAGDIANQLATDAVQILGGNGFNTEYPVEKLMRDAKIYQIYEGTSQIQRLIVAREHIDKYKN

SEQ ID NO: 1941 - protein, 909 aa, Homo sapiens
MSELLYHLTRCGKTDDLLYGIIMNFSWLYTMIKIGQFDKVLSDIELAYNYSQEKELKFLANTLRSIKNKVTAFPGSLSAELQQRLLPVVSSLPKLRHLLLECDKDGPKYCSIVPLHSSMDVTYSPERLPLSSSHLHVTEILPTCNPSTVLTALENGSISTWDVETRQLLRQITTAQSVILGMKLTSDEKYLVVATTNNTLLIYDNVNSCLLSEVEIKGTKHGSSATYINGFTLSANHALAWLEASKDVTVIDLLYGWPLYQFHCWYEVTCVQCSLDGLYAFCGQYLNTTTIFHLGSGEKLCTVTSEFSGGFVKFLLILDTAQEMVMVDSEGSLSVWNTEDISSPQLTDDFDCRREDSEVVSIELSEDQSAVLICKALSIELLDTGLWKVAEKFRAKHNERFISAVLSKNGDCIIATMENTSAVFFWRRDTGQCMASLQEISGSIVKLVKSSHHNMLLSLSTSGVLSIWDIDIITAMSNIDKTGKPIQSLLLPARGEIIYSLDGSDCVHKWNFSSGFIEAVFKHEGIVEHCVLTSTGDIMVTSDDKSSQYVWHTSSGENLFRINGQRISQLLITHNDQFVVSLCEENASRVWRLATGHRVCNILTTLQNAFITSANTFVVGMTKSKVLAVSLWTGSITKKFCCEDGTTIVNFKLIPDCPDIIVFITSAETVNIWSLTDEVICRRVQLPNNFLKNLEDFEISPNGKLGIIARGDENINVLDLYSGKLRVVHASGIIWRQRLSRDGRYLVYICFRNGEEEDENGAIFSLIVMRLADGKNIGACSLYKTPTFLALSQRHLNIIVGFDDGSIGIYTVVDRVDAALKIKIATSNSRQIFNNATHTSRPKCNSYCFKISVDCLWRESTEVFARDSPITVSDSTESNEATPSKKHNSCYERVCSALEARGHSYAPDN

SEQ ID NO: 1942 - protein, 882 aa, Homo sapiens
MSKYLYADSSKTEEEELDESNPFYEPKSTPPPNNLVNPVQELETERRVKRKAPAPPVLSPKTGVLNENTVSAGKDLSTSPKPSPIPSPVLGRKPNASQSLLVWCKEVTKNYRGVKITNFTTSWRNGLSFCAILHHFRPDLIDYKSLNPQDIKENNKKAYDGFASIGISRLLEPSDMVLLAIPDKLTVMTYLYQIRAHFSGQELNVVQIEENSSKSTYKVGNYETDTNSSVDQEKFYAELSDLKREPELQQPISGAVDFLSQDDSVFVNDSGVGESESEHQTPDDHLSPSTASPYCRRTKSDTEPQKSQQSSGRTSGSDDPGICSNTDSTQAQVLLGKKRLLKAETLELSDLYVSDKKKDMSPPFICEETDEQKLQTLDIGSNLEKEKLENSRSLECRSDPESPIKKTSLSPTSKLGYSYSRDLDLAKKKHASLRQTESDPDADRTTLNHADHSSKIVQHRLLSRQEELKERARVLLEQARRDAALKAGNKHNTNTATPFCNRQLSDQQDEERRRQLRERARQLIAEARSGVKMSELPSYGEMAAEKLKERSKASGDENDNIEIDTNEEIPEGFVVGGGDELTNLENDLDTPEQNSKLVDLKLKKLLEVQPQVANSPSSAAQKAVTESSEQDMKSGTEDLRTERLQKTTERFRNPVVFSKDSTVRKTQLQSFSQYIENRPEMKRQRSIQEDTKKGNEEKAAITETQRKPSEDEVLNKGFKDTSQYVVGELAALENEQKQIDTRAALVEKRLRYLMDTGRNTEEEEAMMQEWFMLVNKKNALIRRMNQLSLLEKEHDLERRYELLNRELRAMLAIEDWQKTEAQKRREQLLLDELVALVNKRDALVRDLDAQEKQAEEEDEHLERTLEQNKGKMAKKEEKCVLQ

SEQ ID NO: 1943 - protein, 248 aa, Homo sapiens
MEGVEEKKKEVPAVPETLKKKRRNFAELKMKRLRKKFAQKMLRKARRKLIYEKAKHYHKEYRQMYRTEIRMARMARKAGNFYVPAEPKLAFVIRIRGINGVSPKVRKVLQLLRLRQIFNGTFVKLNKASINMLRIVEPYIAWGYPNLKSVNELIYKRGYGKINKKRIALTDNALIARSLGKYGIICVEDLIHEIYTVGKRFKEANNFLWPFKLSSPRGGMKKKTTHFVEGGDAGNREDQINRLIRRMN

SEQ ID NO: 1944 - protein, 1494 aa, Homo sapiens
MNGGKECDGGDKEGGLPAIQVPVGWQRRVDQNGVLYVSPSGSLLSCLEQVKTYLLTDGTCKCGLECPLILPKVFNFDPGAAVKQRTAEDVKADEDVTKLCIHKRKIIAVATLHKSMEAPHPSLVLTSPGGGTNATPVVPSRAATPRSVRNKSHEGITNSVMPECKNPFKLMIGSSNAMGRLYVQELPGSQQQELHPVYPRQRLGSSEHGQKSPFRGSHGGLPSPASSGSQIYGDGSISPRTDPLGSPDVFTRSNPGFHGAPNSSPIHLNRTPLSPPSVMLHGSPVQSSCAMAGRTNIPLSPTLTTKSPVMKKPMCNFSTNMEIPRAMFHHKPPQGPPPPPPPSCALQKKPLTSEKDPLGILDPIPSKPVNQNPVIINPTSFHSNVHSQVPMMNVSMPPAVVPLPSNLPLPTVKPGHMNHGSHVQRVQHSASTSLSPSPVTSPVHMMGTGIGRIEASPQRSRSSSTSSDHGNFMMPPVGPQATSSGIKVPPRSPRSTIGSPRPSMPSSPSTKSDGHHQYKDIPNPLIAGISNVLNTPSSAAFPTASAGSSSVKSQPGLLGMPLNQILNQHNAASFPASSLLSAAAKAQLANQNKLAGNNSSSSSNSGAVAGSGNTEGHSTLNTMFPPTANMLLPTGEGQSGRAALRDKLMSQQKDALRKRKQPPTTVLSLLRQSQMDSSAVPKPGPDLLRKQGQGSFPISSMSQLLQSMSCQSSHLSSNSTPGCGASNTALPCSANQLHFTDPSMNSSVLQNIPLRGEAVHCHNANTNFVHSNSPVPNHHLAGLINQIQASGNCGMLSQSGMALGNSLHPNPPQSRISTSSTPVIPNSIVSSYNQTSSEAGGSGPSSSIAIAGTNHPAITKTTSVLQDGVIVTTAAGNPLQSQLPIGSDFPFVGQEHALHFPSNSTSNNHLPHPLNPSLLSSLPISLPVNQQHLLNQNLLNILQPSAGEGDMSSINNTLSNHQLTHLQSLLNNNQMFPPNQQQQQLLQGYQNLQAFQGQSTIPCPANNNPMACLFQNFQVRMQEDAALLNKRISTQPGLTALPENPNTTLPPFQDTPCELQPRIDPSLGQQVKDGLVVGGPGDASVDAIYKAVVDAASKGMQVVITTAVNSTTQISPIPALSAMSAFTASIGDPLNLSSAVSAVIHGRNMGGVDHDGRLRNSRGARLPKNLDHGKNVNEGDGFEYFKSASCHTSKKQWDGEQSPRGERNRWKYEEFLDHPGHIHSSPCHERPNNVSTLPFLPGEQHPILLPPRNCPGDKILEENFRYNNYKRTMMSFKERLENTVERCAHINGNRPRQSRGFGELLSTAKQDLVLEEQSPSSSNSLENSLVKDYIHYNGDFNAKSVNGCVPSPSDAKSISSEDDLRNPDSPSSNELIHYRPRTFNVGDLVWGQIKGLTSWPGKLVREDDVHNSCQQSPEEGKVEPEKLKTLTEGLEAYSRVRKRNRKSGKLNNHLEAAIHEAMSELDKMSGTVHQIPQGDRQMRPPKPKRRKISR

SEQ ID NO: 1945 - protein, 600 aa, Homo sapiens
MLSGKKAAAAAAAAAAAATGTEAGPGTAGGSENGSEVAAQPAGLSGPAEVGPGAVGERTPRKKEPPRASPPGGLAEPPGSAGPQAGPTVVPGSATPMETGIAETPEGRRTSRRKRAKVEYREMDESLANLSEDEYYSEEERNAKAEKEKKLPPPPPQAPPEEENESEPEEPSGVEGAAFQSRLPHDRMTSQEAACFPDIISGPQQTQKVFLFIRNRTLQLWLDNPKIQLTFEATLQQLEAPYNSDTVLVHRVHSYLERHGLINFGIYKRIKPLPTKKTGKVIIIGSGVSGLAAARQLQSFGMDVTLLEARDRVGGRVATFRKGNYVADLGAMVVTGLGGNPMAVVSKQVNMELAKIKQKCPLYEANGQAVPKEKDEMVEQEFNRLLEATSYLSHQLDFNVLNNKPVSLGQALEVVIQLQEKHVKDEQIEHWKKIVKTQEELKELLNKMVNLKEKIKELHQQYKEASEVKPPRDITAEFLVKSKHRDLTALCKEYDELAETQGKLEEKLQELEANPPSDVYLSSRDRQILDWHFANLEFANATPLSTLSLKHWDQDDDFEFTGSHLTVRNGYSCVPVALAEGLDIKLNTAVRQVRYTASGM

SEQ ID NO: 1946 - protein, 638 aa, Homo sapiens
MNVKIPENIYRGIRNLLESYHVPELIKDAHLLVESKNLDFQKTVQLTSSELESTLETLKAENQPIRDVLKQLILVLCSEENMQKALELKAKYESDMVTGGYAALINLCCRHDKVEDALNLKEEFDRLDSSAVLDTGKYVGLVRVLAKHGKLQDAINILKEMKEKDVLIKDTTALSFFHMLNGAALRGEIETVKQLHEAIVTLGLAEPSTNISFPLVTVHLEKGDLSTALEVAIDCYEKYKVLPRIHDVLCKLVEKGETDLIQKAMDFVSQEQGEMVMLYDLFFAFLQTGNYKEAKKIIETPGIRARSARLQWFCDRCVANNQVETLEKLVELTQKLFECDRDQMYYNLLKLYKINGDWQRADAVWNKIQEENVIPREKTLRLLAEILREGNQEVPFDVPELWYEDEKHSLNSSSASTTEPDFQKDILIACRLNQKKGAYDIFLNAKEQNIVFNAETYSNLIKLLMSEDYFTQAMEVKAFAETHIKGFTLNDAANSRLIITQVRRDYLKEAVTTLKTVLDQQQTPSRLAVTRVIQALAMKGDVENIEVVQKMLNGLEDSIGLSKMVFINNIALAQIKNNNIDAAIENIENMLTSENKVIEPQYFGLAYLFRKVIEEQLEPAVEKSKHHGGEIGQSVCNL

SEQ ID NO: 1947 - protein, 159 aa, Homo sapiens [sequence omitted]

SEQ ID NO: 1948 - protein, 301 aa, Homo sapiens
MIFLQRQLFLGLESPMTSSTAVMRWMPRRKTTRVRTVSRKKKSKRHKEELDGAGGEEYPMDIWLLLASYIRPEDIVNFSLICKNAWTVTCTAAFWTRLYRRHYTLDASLPLRLRPESMEKLHCLRACVIRSLYHMYEPFAARISKNPAIPESTPSTLKNSKCLLFWCRKIVGNRQEPMWEFNFKFKKQSPRLKSKCTGGLQPPVQYEDVHTNPDQDCCLLQVTTLNFIFIPIVMGMIFTLFTINVSTDMRHHRVRLVFQDSPVHGGRKLRSEQGVQVILDPVHSVRLFDWWHPQYPFSLRA

SEQ ID NO: 1949 - protein, 782 aa, Homo sapiens
  VARIANT 158, 159, 160, 161, 162, 163, 164, 165, 166, 167, 168, 169,170, 171, 172, 173, 174, 610, 611, 612, 613, 614, 615, 616,617, 618, 619, 620, 621, 622, 623, 624, 625, 626, 627, 628,629, 630, 631, 632, 633, 634, 635, 636, 637, 638, 639: Xaa = Any Amino Acid
  VARIANT 640, 641, 642, 643, 644, 645, 646, 647, 648, 649: Xaa = Any Amino Acid
MGKRDRADRDKKKSRKRHYEDEEDDEEDAPGNDPQEAVPSAAGKQVDESGTKVDEYGAKDYRLQMPLKDDHTSRPLWVAPDGHIFLEAFSPVYKYAQDFLVAIAEPVCRPTHVHEYKLTAYSLYAAVSVGLQTSDITEYLRKLSKTGVPDGIMQFIKXXXXXXXXXXXXXXXXXYFVESCHPDVIQHLLQDPVIRECRLRNSEGEATELITETFTSKSAISKTAESSGGPSTSRVTDPQGKSDIPMDLFDFYEQMDKDEEEEEETQTVSFEVKQEMIEELQKRCIHLEYPLLAEYDFRNDSVNPDINIDLKPTAVLRPYQEKSLRKMFGNGRARSGVIVLPCGAGKSLVGVTAACTVRKRCLVLGNSAVSVEQWKAQFKMWSTIDDSQICRFTSDAKDKPIGCSVAISTYSMLGHTTKRSWEAERVMEWLKTQEWGLMILDEVHTIPAKMFRRVLTIVQAHCKLGLTATLVREDDKIVDLNFLIGPKLYEANWMELQNNGYIAKVQCAEVWCPMSPEFYREYVAIKTKKRILLYTMNPNKFRACQFLIKFHERRNDKIIVFADNVFALKEYAIRLNKPYIYGPTSQGERMQILQNFKHNPKINTIFISKXXXXXXXXXXXXXXXXXXXXXXXXXXXXXXXXXXXXXXXXMVAEEYNAFFYSLVSQDTQEMAYSTKRQRFLVDQGYSFKVITKLAGMEEEDLAFSTKEEQQQLLQKVLAATDLDAEEEVVAGEFGSRSSQASRRFGTMSSMSGADDTVYMEYHSSRSKAPSKHVHPLFKRFRK

SEQ ID NO: 1950 - protein, 1358 aa, Homo sapiens
MGNQLAGIAPSQILSVESYFSDIHDFEYDKSLGSTRFFKVARAKHREGLVVVKVFAIQDPTLPLTSYKQELEELKIRLNSAQNCLPFQKASEKASEKAAMLFRQYVRDNLYDRISTRPFLNNIEKRWIAFQILTAVDQAHKSGVRHGDIKTENVMVTSWNWVLLTDFASFKPTYLPEDNPADFNYFFDTSRRRTCYIAPERFVDGGMFATELEYMRDPSTPLVDLNSNQRTRGELKRAMDIFSAGCVIAELFTEGVPLFDLSQLLAYRNGHFFPEQVLNKIEDHSIRELVTQMIHREPDKRLEAEDYLKQQRGNAFPEIFYTFLQPYMAQFAKETFLSADERILVIRKDLGNIIHNLCGHDLPEKAEGEPKENGLVILVSVITSCLQTLKYCDSKLAALELILHLAPRLSVEILLDRITPYLLHFSNDSVPRVRAEALRTLTKVLALVKEVPRNDINIYPEYILPGIAHLAQDDATIVRLAYAENIALLAETALRFLELVQLKNLNMENDPNNEEIDEVTHPNGNYDTELQALHEMVQQKVVTLLSDPENIVKQTLMENGITRLCVFFGRQKANDVLLSHMITFLNDKNDWHLRGAFFDSIVGVAAYVGWQSSSILKPLLQQGLSDAEEFVIVKALYALTCMCQLGLLQKPHVYEFASDIAPFLCHPNLWIRYGAVGFITVVARQISTADVYCKLMPYLDPYITQPIIQIERKLVLLSVLKEPVSRSIFDYALRSKDITSLFRHLHMRQKKRNGSLPDCPPPEDPAIAQLLKKLLSQGMTEEEEDKLLALKDFMMKSNKAKANIVDQSHLHDSSQKGVIDLAALGITGRQVDLVKTKQEPDDKRARKHVKQDSNVNEEWKSMFGSLDPPNMPQALPKGSDQEVIQTGKPPRSESSAGICVPLSTSSQVPEVTTVQNKKPVIPVLSSTILPSTYQIRITTCKTELQQLIQQKREQCNAERIAKQMMENAEWESKPPPPGWRPKGLLVAHLHEHKSAVNRIRVSDEHSLFATCSNDGTVKIWNSQKMEGKTTTTRSILTYSRIGGRVKTLTFCQGSHYLAIASDNGAVQLLGIEASKLPKSPKIHPLQSRILDQKEDGCVVDMHHFNSGAQSVLAYATVNGSLVGWDLRSSSNAWTLKHDLKSGLITSFAVDIHQCWLCIGTSSGTMACWDMRFQLPISSHCHPSRARIRRLSMHPLYQSWVIAAVQGNNEVSMWDMETGDRRFTLWASSAPPLSELQPSPHSVHGIYCSPADGNPILLTAGSDMKIRFWDLAYPERSYVVAGSTSSPSVSYYRKIIEGTEVVQEIQNKQKVGPSDDTPRRGPESLPVGHHDIITDVATFQTTQGFIVTASRDGIVKVWK

SEQ ID NO: 1951 - protein, 121 aa, Homo sapiens [sequence omitted]

SEQ ID NO: 1952 - protein, 341 aa, Homo sapiens
MNVYETTEFDQLRRLSTPPSSNVNSIYHTVWKFFCRDHFGWREYPESVIRLIEEANSRGLKEVRFMMWNNHYILHNSFFRREIKRRPLFRSCFILLPYLQTLGGVPTQAPPPLEATSSSQIICPDGVTSANFYPETWVYMHPSQDFIQVPVSAEDKSYRIIYNLFHKTVPEFKYRILQILRVQNQFLWEKYKRKKEYMNRKMFGRDRIINERHLFHGTSQDVVDGICKHNFDPRVCGKHATMFGQGSYFAKKASYSHNFSKKSSKGVHFMFLAKVLTGRYTMGSHGMRRPPPVNPGSVTSDLYDSCVDNFFEPQIFVIFNDDQSYPYFVIQYEEVSNTVSI

SEQ ID NO: 1953 - protein, 1098 aa, Homo sapiens [sequence omitted]

SEQ ID NO: 1954 - protein, 48 aa, Homo sapiens
MQAKEMDEEDKAFKQKQKEEQKKLEELKWKATGKGPLATSGIKKSGKK

SEQ ID NO: 1955 - protein, 143 aa, Homo sapiens
MGFPEAASSFRTHQIEAVPTSSASDGFKANLVFKEIEKKLEEEGEQFVKKIGGIFAFKVKDGPGGKEATWVVDVKNGKGSVLPNSDKKADCTITMADSDFLALMTGKMNPQSAFFQGKLKITGNMGLAMKLQNLQLQPGNAKL

SEQ ID NO: 1956 - protein, 183 aa, Homo sapiens
MQEPWLPGARQGTRGQMPLEAVPLREVLPDLRAPEDHGRAEGAQDAGRRGGAGGGPVCAGAQAGLRGCGRRPRPRPRPGREPPPAVPGDSLRRRRPGTRGPRGRLLLRAAPAGPEPRPESPPAGSGRPQPRGAERASRRGDAQPCGTPFWGGGRRQWLPWPPRPAQADADRARPTVHRLWCAL

SEQ ID NO: 1957 - protein, 1016 aa, Homo sapiens [sequence omitted]

SEQ ID NO: 1958 - protein, 1426 aa, Homo sapiens
MHSSNPKVRSSPSGNTQSSPKSKQEVMVRPPTVMSPSGNPQLDSKFSNQGKQGGSASQSQPSPCDSKSGGHTPKALPGPGGSMGLKNGAGNGAKGKGKRERSISADSFDQRDPGTPNDDSDIKECNSADHIKSQDSQHTPHSMTPSNATAPRSSTPSHGQTTATEPTPAQKTPAKVVYVFSTEMANKAAEAVLKGQVETIVSFHIQNISNNKTERSTAPLNTQISALRNDPKPLPQQPPAPANQDQNSSQNTRLQPTPPIPAPAPKPAAPPRPLDRESPGVENKLIPSVGSPASSTPLPPDGTGPNSTPNNRAVTPVSQGSNSSSADPKAPPPPPVSSGEPPTLGENPDGLSQEQLEHRERSLQTLRDIQRMLFPDEKEFTGAQSGGPQQNPGVLDGPQKKPEGPIQAMMAQSQSLGKGPGPRTDVGAPFGPQGHRDVPFSPDEMVPPSMNSQSGTIGPDHLDHMTPEQIAWLKLQQEFYEEKRRKQEQVVVQQCSLQDMMVHQHGPRGVVRGPPPPYQMTPSEGWAPGGTEPFSDGINMPHSLPPRGMAPHPNMPGSQMRLPGFAGMINSEMEGPNVPNPASRPGLSGVSWPDDVPKIPDGRNFPPGQGIFSGPGRGERFPNPQGLSEEMFQQQLAEKQLGLPPGMAMEGIRPSMEMNRMIPGSQRHMEPGNNPIFPRIPVEGPLSPSRGDFPKGIPPQMGPGRELEFGMVPSGMKGDVNLNVNMGSNSQMIPQKMREAGAGPEEMLKLRPGGSDMLPAQQKMVPLPFGEHPQQEYGMGPRPFLPMSQGPGSNSGLRNLREPIGPDQRTNSRLSHMPPLPLNPSSNPTSLNTAPPVQRGLGRKPLDISVAGSQVHSPGINPLKSPTMHQVQSPMLGSPSGNLKSPQTPSQLAGMLAGPAAAASIKSPPVLGSAAASPVHLKSPSLPAPSPGWTSSPKPPLQSPGIPPNHKAPLTMASPAMLGNVESGGPPPPTASQPASVNIPGSLPSSTPYTMPPEPTLSQNPLSIMMSRMSKFAMPSSTPLYHDAIKTVASSDDDSPPARSPNLPSMNNMPGMGINTQNPRISGPNPVVPMPTLSPMGMTQPLSHSNQMPSPNAVGPNIPPHGVPMGPGLMSHNPIMGHGSQEPPMVPQGRMGFPQGFPPVQSPPQQVPFPHNGPSGGQGSFPGGMGFPGEGPLGRPSNLPQSSADAALCKPGGPGGPDSFTVLGNSMPSVFTDPDLQEVIRPGATGIPEFDLSRIIPSEKPSQTLQYFPRGEVPGRKQPQGPGPGFSHMQGMMGEQAPRMGLALPGMGGPGPVGTPDIPLGTAPSMPGHNPMRPPAFLQQGMMGPHHRMMSPAQSTMPGQPTLMSNPAAAVGMIPGKDRGPAGLYTHPGPVGSPGMMMSMQGMMGPQQNIMIPPQMRPRGMAADVGMGGFSQGPGNPGNMMF

SEQ ID NO: 1959 - protein, 286 aa, Homo sapiens
MMDKYPEMVSRIKIGSTVEDNPLYVLKIGEKNERRKAIFTDCGIHAREWVSPAFCQWFVYQATKTYGRNKIMTKLLDRMNFYILPVFNVDGYIWSWTKNRMWRKNRSKNQNSKCIGTDLNRNFNASWNSIPNTNDPCADNYRGSAPESEKETKAVTNFIRSHLNEIKVYITFHSYSQMLLFPYGYTSKLPPNHEDLAKVAKIGTDVLSTRYETRYIYGPIESTIYPISGSSLDWAYDLGIKHTFAFELRDKGKFGFLLPESRIKPTCRETMLAVKFIAKYILKHTS

SEQ ID NO: 1960 - protein, 482 aa, Homo sapiens
MAAVRMLRTWSRNAGKLICVRYFQTCGNVHVLKPNYVCFFGYPSFKYSHPHHFLKTTAALRGQVVQFKLSDIGEGIREVTVKEWYVKEGDTVSQFDSICEVQSDKASVTITSRYDGVIKKLYYNLDDIAYVGKPLVDIETEALKDSEEDVVETPAVSHDEHTHQEIKGRKTLATPAVRRLAMENNIKLSEVVGSGKDGRILKEDILNYLEKQTGAILPPSPKVEIMPPPPKPKDMTVPILVSKPPVFTGKDKTEPIKGFQKAMVKTMSAALKIPHFGYCDEIDLTELVKLREELKPIAFARGIKLSFMPFFLKAASLGLLQFPILNASVDENCQNITYKASHNIGIAMDTEQGLIVPNVKNVQICSIFDIATELNRLQKLGSVSQLSTTDLTGGTFTLSNIGSIGGTFAKPVIMPPEVAIGALGSIKAIPRFNQKGEVYKAQIMNVSWSADHRVIDGATMSRFSNLWKSYLENPAFMLLDLK

SEQ ID NO: 1961 - protein, 1093 aa, Homo sapiens
MSWFNASQLSSFAKQALSQAQKSIDRVLDIQEEEPSIWAETIPYGEPGISSPVSGGWDTSTWGLKSNTEPQSPPIASPKAITKPVRRTVVDESENFFSAFLSPTDVQTIQKSPVVSKPPAKSQRPEEEVKSSLHESLHIGQSRTPETTESQVKDSSLCVSGETLAAGTSSPKTEGKHEETVNKESDMKVPTVSLKVSESVIDVKTTMESISNTSTQSLTAETKDIALEPKEQKHEDRQSNTPSPPVSTFSSGTSTTSDIEVLDHESVISESSASSRQETTDSKSSLHLMQTSFQLLSASACPEYNRLDDFQKLTESCCSSDAFERIDSFSVQSLDSRSVSEINSDDELSGKGYALVPIIVNSSTPKSKTVESAEGKSEEVNETLVIPTEEAEMEESGRSATPVNCEQPDILVSSTPINEGQTVLDKVAEQCEPAESQPEALSEKEDVCKTVEFLNEKLEKREAQLLSLSKEKALLEEAFDNLKDEMFRVKEESSSISSLKDEFTQRIAEAEKKVQLACKERDAAKKEIKNIKEELATRLNSSETADLLKEKDEQIRGLMEEGEKLSKQQLHNSNIIKKLRAKDKENENMVAKLNKKVKELEEELQHLKQVLDGKEEVEKQHRENIKKLNSMVERQEKDLGRLQVDMDELEEKNRSIQAALDSAYKELTDLHKANAAKDSEAQEAALSREMKAKEELSAALEKAQEEARQQQETLAIQVGDLRLALQRTEQAAARKEDYLRHEIGELQQRLQEAENRNQELSQSVSSTTRPLLRQIENLQATLGSQTSSWEKLEKNLSDRLGESQTLLAAAVERERAATEELLANKIQMSSMESQNSLLRQENSRFQAQLESEKNRLCKLEDENNRYQVELENLKDEYVRTLEETRKEKTLLNSQLEMERMKVEQERKKAIFTQETIKEKERKPFSVSSTPTMSRSSSISGVDMAGLQTSFLSQDESHDHSFGPMPISANGSNLYDAVRMGAGSSIIENLQSQLKLREGEITHLQLEIGNLEKTRSIMAEELVKLTNQNDELEEKVKEIPKLRTQLRDLDQRYNTILQMYGEKAEEAEELRLDLEDVKNMYKTQIDELLRQSLS

SEQ ID NO: 1962 - protein, 94 aa, Homo sapiens
MCTGALRVRYTACSIVWIHLTAQDRSIRSLFWHLLDWGEQRARQQARGRRQKETPRRGEAQGLRKADSSLQKSLPSKAPVLWAGRGGCKLRRGH

SEQ ID NO: 1963 - protein, 602 aa, Homo sapiens
MPRNQGFSEPEYSAEYSAEYSVSLPSDPDRGVGRTHEISVRNSGSCLCLPRFMRLTFVPESLENLYQTYFKRQRHETLLVLVVFAALFDCYVVVMCAVVFSSDKLASLAVAGIGLVLDIILFVLCKKGLLPDRVTRRVLLYVLWLLITAQIFSYLGLNFARAHAASDTVGWQVFFVFSFFITLPLSLSPIVIISVVSCVVHTLVLGVTVAQQQQEELKGMQLLREILANVFLYLCAIAVGIMSYYMADRKHRKAFLEARQSLEVKMNLEEQSQQQENLMLSILPKHVADEMLKDMKKDESQKDQQQFNTMYMYRHENVSILFADIVGFTQLSSACSAQELVKLLNELFARFDKLAAKYHQLRIKILGDCYYCICGLPDYREDHAVCSILMGLAMVEAISYVREKTKTGVDMRVGVHTGTVLGGVLGQKRWQYDVWSTDVTVANKMEAGGIPGRVHISQSTMDCLKGEFDVEPGDGGSRCDYLEEKGIETYLIIASKPEVKKTATQNGLNGSALPNGAPASSKSSSPALIETKEPNGSAHSSGSTSEKPEEQDAQADNPSFPNPRRRLRLQDLADRVVDASEDEHELNQLLNEALLERESAQV

SEQ ID NO: 1964 - protein, 1243 aa, Homo sapiens
MLIHPPDEPGTENQEACQRYEVMQCFTVSQPKSIQEDGEDFQSCLICIARRLPRPPAITGVESFMTKQDTTGKIISIDTSSLRAAGRTGWEDLVRKCIYAFFQPQGREPSYARQLFQEVMTRGTASSPSYRFILNDGTMLSAHTKCKLCYPQSPDMQPFIMGIHIIDREHSGLSPQDDTNSGMSIPRVNPSVNPSISPAHGVARSSTLPPSNSNMVSTRINRQQSSDLHSSSHSNSSNSQGSFGCSPGSQIVANVALNQGQASSQSSNPSLNLNNSPMEGTGISLAQFMSPRRQVTSGLATRPRMPNNSFPPNISTLSSPVGMTSSACNNNNRSYSNIPVTSLQGMNEGPNNSVGFSASSPVLRQMSSQNSPSRLNIQPAKAESKDNKEIASILNEMIQSDNSSSDGKPLDSGLLHNNDRLSDGDSKYSQTSHKLVQLLTTTAEQQLRHADIDTSCKDVLSCTGTSNSASANSSGGSCPSSHSSLTERHKILHRLLQEGSPSDITTLSVEPDKKDSASTSVSVTGQVQGNSSIKLELDASKKKESKDHQLLRYLLDKDEKDLRSTPNLSLDDVKVKVEKKEQMDPCNTNPTPMTKPTPEEIKLEAQSQFTADLDQFDQLLPTLEKAAQLPGLCETDRMDGAVTSVTIKSEILPASLQSATARPTSRLNRLPELELEAIDNQFGQPGTGDQIPWTNNTVTAINQSKSEDQCISSQLDELLCPPTTVEGRNDEKALLEQLVSFLSGKDETELAELDRALGIDKLVQGGGLDVLSERFPPQQATPPLIMEERPNLYSQPYSSPSPTANLPSPFQGMVRQKPSLGTMPVQVTPPRGAFSPGMGMQPRQTLNRPPAAPNQLRLQLQQRLQGQQQLIHQNRQAILNQFAATAPVGINMRSGMQQQITPQPPLNAQMLAQRQRELYSQQHRQRQLIQQQRAMLMRQQSFGNNLPPSSGLPVQMGNPRLPQGAPQQFPYPPNYGTNPGTPPASTSPFSQLAANPEASLANRNSMVSRGMTGNIGGQFGTGINPQMQQNVFQYPGAGMVPQGEANFAPSLSPGSSMVPMPIPPPQSSLLQQTPPASGYQSPDMKAWQQGAIGNNNVFSQAVQNQPTPAQPGVYNNMSITVSMAGGNTNVQNMNPMMAQMQMSSLQMPGMNTVCPEQINDPALRHTGLYCNQLSSTDLLKTEADGTQQVQQVQVFADVQCTVNLVGGDPYLNQPGPLGTQKPTSGPQTPQAQQKSLLQQLLTE

SEQ ID NO: 1965 - protein, 763 aa, Homo sapiens
MVACRAIGILSRFSAFRILRSRGYICRNFTGSSALLTRTHINYGVKGDVAVVRINSPNSKVNTLSKELHSEFSEVMNEIWASDQIRSAVLISSKPGCFIAGADINMLAACKTLQEVTQLSQEAQRIVEKLEKSTKPIVAAINGSCLGGGLEVAISCQYRIATKDRKTVLGTPEVLLGALPGAGGTQRLPKMVGVPAALDMMLTGRSIRADRAKKMGLVDQLVEPLGPGLKPPEERTIEYLEEVAITFAKGLADKKISPKRDKGLVEKLTAYAMTIPFVRQQVYKKVEEKVRKQTKGLYPAPLKIIDVVKTGIEQGSDAGYLCESQKFGELVMTKESKALMGLYHGQVLCKKNKFGAPQKDVKHLAILGAGLMGAGIAQVSVDKGLKTILKDATLTALDRGQQQVFKGLNDKVKKKALTSFERDSIFSNLTGQLDYQGFEKADMVIEAVFEDLSLKHRVLKEVEAVIPDHCIFASNTSALPISEIAAVSKRPEKVIGMHYFSPVDKMQLLEIITTEKTSKDTSASAVAVGLKQGKVIIVVKDGPGFYTTRCLAPMMSEVIRILQEGVDPKKLDSLTTSFGFPVGAATLVDEVGVDVAKHVAEDLGKVFGERFGGGNPELLTQMVSKGFLGRKSGKGFYIYQEGVKRKDLNSDMDSILASLKLPPKSEVSSDEDIQFRLVTRFVNEAVMCLQEGILATPAEGDIGAVFGLGFPPCLGGPFRFVDLYGAQKIVDRLKKYEAAYGKQFTPCQLLADHANSPNKKFYQ

SEQ ID NO: 1966 - protein, 679 aa, Homo sapiens
MVTSLNEDNESVTVEWIENGDTKGKEIDLESIFSLNPDLVPDEEIEPSPETPPPPASSAKVNKIVKNRRTVASIKNDPPSRDNRVVGSARARPSQFPEQSSSAQQNGSVSDISPVQAAKKEFGPPSRRKSNCVKEVEKLQEKREKRRLQQQELREKRAQDVDATNPNYEIMCMIRDFRGSLDYRPLTTADPIDEHRICVCVRKRPLNKKETQMKDLDVITIPSKDVVMVHEPKQKVDLTRYLENQTFRFDYAFDDSAPNEMVYRFTARPLVETIFERGMATCFAYGQTGSGKTHTMGGDFSGKNQDCSKGIYALAARDVFLMLKKPNYKKLELQVYATFFEIYSGKVFDLLNRKTKLRVLEDGKQQVQVVGLQEREVKCVEDVLKLIDIGNSCRTSGQTSANAHSSRSHAVFQIILRRKGKLHGKFSLIDLAGNERGADTSSADRQTRLEGAEINKSLLALKECIRALGRNKPHTPFRASKLTQVLRDSFIGENSRTCMIATISPGMASCENTLNTLRYANRVKELTVDPTAAGDVRPIMHHPPNQIDDLETQWGVGSSPQRDDLKLLCEQNEEEVSPQLFTFHEAVSQMVEMEEQVVEDHRAVFQESIRWLEDEKALLEMTEEVDYDVDSYATQLEAILEQKIDILTELRDKVKSFRAALQEEEQASKQINPKRPRAL

SEQ ID NO: 1967 - protein, 2092 aa, Homo sapiens
MAHLGNYDSGTAETPETDESVSSSNASLKLRRKPRESDFETIKLISNGAYGAVYFVRHKESRQRFAMKKINKQNLILRNQIQQAFVERDILTFAENPFVVSMYCSFETRRHLCMVMEYVEGGDCATLMKNMGPLPVDMARMYFAETVLALEYLHNYGIVHRDLKPDNLLVTSMGHIKLTDFGLSKVGLMSMTTNLYEGHIEKDAREFLDKQVCGTPEYIAPEVILRQGYGKPVDWWAMGIILYEFLVGCVPFFGDTPEELFGQVISDEINWPEKDEAPPPDAQDLITLLLRQNPLERLGTGGAYEVKQHRFFRSLDWNSLLRQKAEFIPQLESEDDTSYFDTRSEKYHHMETEEEDDTNDEDFNVEIRQFSSCSHRFSKVFSSIDRITQNSAEEKEDSVDKTKSTTLPSTETLSWSSEYSEMQQLSTSNSSDTESNRHKLSSGLLPKLAISTEGEQDEAASCPGDPHEEPGKPALPPEECAQEEPEVTTPASTISSSTLSVGSFSEHLDQINGRSECVDSTDNSSKPSSEPASHMARQRLESTEKKKISGKVTKSLSASALSLMIPGDMFAVSPLGSPMSPHSLSSDPSSSRDSSPSRDSSAASASPHQPIVIHSSGKNYGFTIRAIRVYVGDSDIYTVHHIVWNVEEGSPACQAGLKAGDLITHINGEPVHGLVHTEVIELLLKSGNKVSITTTPFENTSIKTGPARRNSYKSRMVRRSKKSKKKESLERRRSLFKKLAKQPSPLLHTSRSFSCLNRSLSSGESLPGSPTHSLSPRSPTPSYRSTPDFPSGTNSSQSSSPSSSAPNSPAGSGHIRPSTLHGLAPKLGGQRYRSGRRKSAGNIPLSPLARTPSPTPQPTSPQRSPSPLLGHSLGNSKIAQAFPSKMHSPPTIVRHIVRPKSAEPPRSPLLKRVQSEEKLSPSYGSDKKHLCSRKHSLEVTQEEVQREQSQREAPLQSLDENVCDVPPLSRARPVEQGCLKRPVSRKVGRQESVDDLDRDKLKAKVVVKKADGFPEKQESHQKSHGPGSDLENFALFKLEEREKKVYPKAVERSSTFENKASMQEAPPLGSLLKDALHKQASVRASEGAMSDGPVPAEHRQGGGDFRRAPAPGTLQDGLCHSLDRGISGKGEGTEKSSQAKELLRCEKLDSKLANIDYLRKKMSLEDKEDNLCPVLKPKMTAGSHECLPGNPVRPTGGQQEPPPASESRAFVSSTHAAQMSAVSFVPLKALTGRVDSGTEKPGLVAPESPVRKSPSEYKLEGRSVSCLKPIEGTLDIALLSGPQASKTELPSPESAQSPSPSGDVRASVPPVLPSSSGKKNDTTSARELSPSSLKMNKSYLLEPWFLPPSRGLQNSPAVSLPDPEFKRDRKGPHPTARSPGTVMESNPQQREGSSPKHQDHTTDPKLLTCLGQNLHSPDLARPRCPLPPEASPSREKPGLRESSERGPPTARSERSAARADTCREPSMELCFPETAKTSDNSKNLLSVGRTHPDFYTQTQAMEKAWAPGGKTNHKDGPGEARPPPRDNSSLHSAGIPCEKELGKVRRGVEPKPEALLARRSLQPPGIESEKSEKLSSFPSLQKDGAKEPERKEQPLQRHPSSIPPPPLTAKDLSSPAARQHCSSPSHASGREPGAKPSTAEPSSSPQDPPKPVAAHSESSSHKPRPGPDPGPPKTKHPDRSLSSQKPSVGATKGKEPATQSLGGSSREGKGHSKSGPDVFPATPGSQNKASDGIGQGEGGPSVPLHTDRAPLDAKPQPTSGGRPLEVLEKPVHLPRPGHPGPSEPADQKLSAVGEKQTLSPKHPKPSTVKDCPTLCKQTDNRQTDKSPSQPAANTDRRAEGKKCTEALYAPAEGDKLEAGLSFVHSENRLKGAERPAAGVGKGFPEARGKGPGPQKPPTEADKPNGMKRSPSATGQSSFRSTALPEKSLSCSSSFPETRAGVREASAASSDTSSAKAAGGMLELPAPSNRDHRKAQPAGEGRTHMTKSDSLPSFRVSTLPLESHHPDPNTMGGASHRDRALSVTATVGETKGKDPAPAQPPPARKQNVGRDVTKPSPAPNTDRPISLSNEKDFVVRQRRGKESLRSSPHKKAL

SEQ ID NO: 1968 - protein, 1748 aa, Homo sapiens
MARFGEAVVARPGSGDGDSDQSRNRQGTPVPASGQAAAYKQTKAQRARTMALYNPIPVRQNCFTVNRSLFIFGEDNIVRKYAKKLIDWPPFEYMILATIIANCIVLALEQHLPEDDKTPMSRRLEKTEPYFIGIFCFEAGIKIVALGFIFHKGSYLRNGWNVMDFIVVLSGILATAGTHFNTHVDLRTLRAVRVLRPLKLVSGIPSLQIVLKSIMKAMVPLLQIGLLLFFAILMFAIIGLEFYSGKLHRACFMNNSGILEGFDPPHPCGVQGCPAGYECKDWIGPNDGITQFDNILFAVLTVFQCITMEGWTTVLYNTNDALGATWNWLYFIPLIIIGSFFVLNLVLGVLSGEFAKERERVENRRAFMKLRRQQQIERELNGYRAWIDKAEEVMLAEENKNAGTSALEVLRRATIKRSRTEAMTRDSSDEHCVDISSVGTPLARASIKSAKVDGVSYFRHKERLLRISIRHMVKSQVFYWIVLSLVALNTACVAIVHHNQPQWLTHLLYYAEFLFLGLFLLEMSLKMYGMGPRLYFHSSFNCFDFGVTVGSIFEVVWAIFRPGTSFGISVLRALRLLRIFKITKYWASLRNLVVSLMSSMKSIISLLFLLFLFIVVFALLGMQLFGGRFNFNDGTPSANFDTFPAAIMTVFQILTGEDWNEVMYNGIRSQGGVSSGMWSAIYFIVLTLFGNYTLLNVFLAIAVDNLANAQELTKDEQEEEEAFNQKHALQKAKEVSPMSAPNMPSIERERRRRHHMSVWEQRTSQLRKHMQMSSQEALNREEAPTMNPLNPLNPLSSLNPLNAHPSLYRRPRAIEGLALGLALEKFEEERISRGGSLKGDGGDRSSALDNQRTPLSLGQREPPWLARPCHGNCDPTQQEAGGGEAVVTFEDRARHRQSQRRSRHRRVRTEGKESSSASRSRSASQERSLDEAMPTEGEKDHELRGNHGAKEPTIQEERAQDLRRTNSLMVSRGSGLAGGLDEADTPLVLPHPELEVGKHVVLTEQEPEGSSEQALLGNVQLDMGRVISQSEPDLSCITANTDKATTESTSVTVAIPDVDPLVDSTVVHISNKTDGEASPLKEAEIREDEEEVEKKKQKKEKRETGKAMVPHSSMFIFSTTNPIRRACHYIVNLRYFEMCILLVIAASSIALAAEDPVLTNSERNKVLRYFDYVFTGVFTFEMVIKMIDQGLILQDGSYFRDLWNILDFVVVVGALVAFALANALGTNKGRDIKTIKSLRVLRVLRPLKTIKRLPKLKAVFDCVVTSLKNVFNILIVYKLFMFIFAVIAVQLFKGKFFYCTDSSKDTEKECIGNYVDHEKNKMEVKGREWKRHEFHYDNIIWALLTLFTVSTGEGWPQVLQHSVDVTEEDRGPSRSNRMEMSIFYVVYFVVFPFFFVNIFVALIIITFQEQGDKMMEECSLEKNERACIDFAISAKPLTRYMPQNRHTFQYRVWHFVVSPSFEYTIMAMIALNTVVLMMKYYSAPCTYELALKYLNIAFTMVFSLECVLKVIAFGFLNYFRDTWNIFDFITVIGSITEIILTDSKLVNTSGFNMSFLKLFRAARLIKLLRQGYTIRILLWTFVQSFKALPYVCLLIAMLFFIYAIIGMQVFGNIKLDEESHINRHNNFRSFFGSLMLLFRSATGEAWQEIMLSCLGEKGCEPDTTAPSGQNENERCGTDLAYVYFVSFIFFCSFLMLNLFVAVIMDNFEYLTRDSSILGPHHLDEFVRVWAEYDRAAVAASITLRCMKC

SEQ ID NO: 1969 - protein, 1088 aa, Homo sapiens
MLQTFDYSRDPQEREFTTAVSSPGGQSVVLGSYDRLRVFNWIPRRSIWEEAKPKEITNLYTITALAWKRDGSRLCVGTLCGGVEQFDCCLRRSIYKNKFELTYVGPSQVIVKNLSSGTRVVLKSHYGYEVEEVKILGKERYLVAHTSETLLLGDLNTNRLSEIAWQGSGGNEKYFFENENVCMIFNAGELTLVEYGNNDTLGSVRTEFMNPHLISVRINERCQRGTEDNKKLAYLIDIKTIAIVDLIGGYNIGTVSHESRVDWLELNETGHKLLFRDRKLRLHLYDIESCSKTMILNFCSYMQWVPGSDVLVAQNRNSLCVWYNIEAPERVTMFTIRGDVIGLERGGGKTEVMVMEGVTTVAYTLDEGLIEFGTAIDDGNYIRATAFLETLEMTPETEAMWKTLSKLALEARQLHIAERCFSALGQVAKARFLHETNEIADQVSREYGGEGTDFYQVRARLAMLEKNYKLAEMIFLEQNAVEEAMGMYQELHRWDECIAVAEAKGHPALEKLRRSYYQWLMDTQQEERAGELQESQGDGLAAISLYLKAGLPAKAARLVLTREELLANTELVEHITAALIKGELYERAGDLFEKIHNPQKALECYRKGNAFMKAVELARLAFPVEVVKLEEAWGDHLVQQKQLDAAINHYIEARCSIKAIEAALGARQWKKAIYILDLQDRNTASKYYPLVAQHYASLQEYEIAEELYTKGDRTKDAIDMYTQAGRWEQAHKLAMKCMRPEDVSVLYITQAQEMEKQGKYREAERLYVTVQEPDLAITMYKKHKLYDDMIRLVGKHHPDLLSDTHLHLGKELEAEGRLQEAEYHYLEAQEWKATVNMYRASGLWEEAYRWPELKEGLMPTNTWPICGQRAWEERLQLDCLISWDSWKLLLTTLQTIAPLNLRLNSLGWPSSTKPPRFISNMLCSWRMRVNSKRLKLNSSELVNPRRQSSCLSITRIGRQLSVWLRLTTLTVSPRCLWDRPGGPWRRRTFRKQKGCCSGPRDQAWPSIIIRRLDYGVTLCASARTMCPASWRLCRKNMSGKLLRRGPGVWRDLWNKLDTGSRLESTAVPWTATSKCETLETAAWRRSAG

SEQ ID NO: 1970 - protein, 2843 aa, Homo sapiens
MAAASYDQLLKQVEALKMENSNLRQELEDNSNHLTKLETEASNMKEVLKQLQGSIEDEAMASSGQIDLLERLKELNLDSSNFPGVKLRSKMSLRSYGSREGSVSSRSGECSPVPMGSFPRRGFVNGSRESTGYLEELEKERSLLLADLDKEEKEKDWYYAQLQNLTKRIDSLPLTENFSLQTDMTRRQLEYEARQIRVAMEEQLGTCQDMEKRAQRRIARIQQIEKDILRIRQLLQSQATEAERSSQNKHETGSHDAERQNEGQGVGEINMATSGNGQGSTTRMDHETASVLSSSSTHSAPRRLTSHLGTKVEMVYSLLSMLGTHDKDDMSRTLLAMSSSQDSCISMRQSGCLPLLIQLLHGNDKDSVLLGNSRGSKEARARASAALHNIIHSQPDDKRGRREIRVLHLLEQIRAYCETCWEWQEAHEPGMDQDKNPMPAPVEHQICPAVCVLMKLSFDEEHRHAMNELGGLQAIAELLQVDCEMYGLTNDHYSITLRRYAGMALTNLTFGDVANKATLCSMKGCMRALVAQLKSESEDLQQVIASVLRNLSWRADVNSKKTLREVGSVKALMECALEVKKESTLKSVLSALWNLSAHCTENKADICAVDGALAFLVGTLTYRSQTNTLAIIESGGGILRNVSSLIATNEDHRQILRENNCLQTLLQHLKSHSLTIVSNACGTLWNLSARNPKDQEALWDMGAVSMLKNLIHSKHKMIAMGSAAALRNLMANRPAKYKDANIMSPGSSLPSLHVRKQKALEAELDAQHLSETFDNIDNLSPKASHRSKQRHKQSLYGDYVFDTNRHDDNRSDNFNTGNMTVLSPYLNTTVLPSSSSSRGSLDSSRSEKDRSLERERGIGLGNYHPATENPGTSSKRGLQISTTAAQIAKVMEEVSAIHTSQEDRSSGSTTELHCVTDERNALRRSSAAHTHSNTYNFTKSENSNRTCSMPYAKLEYKRSSNDSLNSVSSSDGYGKRGQMKPSIESYSEDDESKFCSYGQYPADLAHKIHSANHMDDNDGELDTPINYSLKYSDEQLNSGRQSPSQNERWARPKHIIEDEIKQSEQRQSRNQSTTYPVYTESTDDKHLKFQPHFGQQECVSPYRSRGANGSETNRVGSNHGINQNVSQSLCQEDDYEDDKPTNYSERYSEEEQHEEEERPTNYSIKYNEEKRHVDQPIDYSLKYATDIPSSQKQSFSFSKSSSGQSSKTEHMSSSSENTSTPSSNAKRQNQLHPSSAQSRSGQPQKAATCKVSSINQETIQTYCVEDTPICFSRCSSLSSLSSAEDEIGCNQTTQEADSANTLQIAEIKEKIGTRSAEDPVSEVPAVSQHPRTKSSRLQGSSLSSESARHKAVEFSSGAKSPSKSGAQTPKSPPEHYVQETPLMFSRCTSVSSLDSFESRSIASSVQSEPCSGMVSGIISPSDLPDSPGQTMPPSRSKTPPPPPQTAQTKREVPKNKAPTAEKRESGPKQAAVNAAVQRVQVLPDADTLLHFATESTPDGFSCSSSLSALSLDEPFIQKDVELRIMPPVQENDNGNETESEQPKESNENQEKEAEKTIDSEKDLLDDSDDDDIEILEECIISAMPTKSSRKAKKPAQTASKLPPPVARKPSQLPVYKLLPSQNRLQPQKHVSFTPGDDMPRVYCVEGTPINFSTATSLSDLTIESPPNELAAGEGVRGGAQSGEFEKRDTIPTEGRSTDEAQGGKTSSVTIPELDDNKAEEGDILAECINSAMPKGKSHKPFRVKKIMDQVQQASASSSAPNKNQLDGKKKKPTSPVKPIPQNTEYRTRVRKNADSKNNLNAERVFSDNKDSKKQNLKNNSKVFNDKLPNNEDRVRGSFAFDSPHHYTPIEGTPYCFSRNDSLSSLDFDDDDVDLSREKAELRKAKENKESEAKVTSHTELTSNQQSANKTQAIAKQPINRGQPKPILQKQSTFPQSSKDIPDRGAATDEKLQNFAIENTPVCFSHNSSLSSLSDIDQENNNKENEPIKETEPPDSQGEPSKPQASGYAPKSFHVEDTPVCFSRNSSLSSLSIDSEDDLLQECISSAMPKKKKPSRLKGDNEKHSPRNMGGILGEDLTLDLKDIQRPDSEHGLSPDSENFDWKAIQEGANSIVSSLHQAAAAACLSRQASSDSDSILSLKSGISLGSPFHLTPDQEEKPFTSNKGPRILKPGEKSTLETKKIESESKGIKGGKKVYKSLITGKVRSNSEISGQMKQPLQANMPSISRGRTMIHIPGVRNSSSSTSPVSKKGPPLKTPASKSPSEGQTATTSPRGAKPSVKSELSPVARQTSQIGGSSKAPSRSGSRDSTPSRPAQQPLSRPIQSPGRNSISPGRNGISPPNKLSQLPRTSSPSTASTKSSGSGKMSYTSPGRQMSQQNLTKQTGLSKNASSIPRSESASKGLNQMNNGNGANKKVELSRMSSTKSSGSESDRSERPVLVRQSTFIKEAPSPTLRRKLEESASFESLSPSSRPASPTRSQAQTPVLSPSLPDMSLSTHSSVQAGGWRKLPPNLSPTIEYNDGRPAKRHDIARSHSESPSRLPINRSGTWKREHSKHSSSLPRVSTWRRTGSSSSILSASSESSEKAKSEDEKHVNSISGTKQSKENQVSAKGTWRKIKENEFSPTNSTSQTVSSGATNGAESKTLIYQMAPAVSKTEDVWVRIEDCPINNPRSGRSPTGNTPPVIDSVSEKANPNIKDSKDNQAKQNVGNGSVPMRTVGLENRLNSFIQVDAPDQKGTEIKPGQNNPVPVSETNESSIVERTPFSSSSSSKHSSPSGTVAARVTPFNYNPSPRKSSADSTSARPSQIPTPVNNNTKKRDSKTDSTESSGTQSPKRHSGSYLVTSV

SEQ ID NO: 1971 - protein, 758 aa, Homo sapiens
  VARIANT 388, 389, 390, 391, 392, 393: Xaa = Any Amino Acid
MLRACQLSGVTAAAQSCLCGKFVLRPLRPCRRYSTSGSSGLTTGKIAGAGLLFVGGGIGGTILYAKWDSHFRESVEKTIPYSDKLFEMVLGPAAYNVPLPKKSIQSGPLKISSVSEVMKESKQPASQLQKQKGDTPASATAPTEAAQIISAAGDTLSVPAPAVQPEESLKTDHPEIGEGKPTPALSEEASSSSIRERPPEEVAARLAQQEKQEQVKIESLAKSLEDALRQTASVTLQAIAAQNAAVQAVNAHSNILKAAMDNSEIAGEKKSAQWRTVEGALKERRKAVDEAADALLKAKEELEKMKSVIENAKKKEVAGAKPHITAAEGKLHNMIVDLDNVVKKVQAAQSEAKVVSQYHELVVQARDDFKRELDSITPEVLPGWKGMXXXXXXDKLSTDDLNSLIAHAHRRIDQLNRELAEQKATEKQHITLALEKQKLEEKRAFDSAVAKALEHHRSEIQAEQDRKIEEVRDAMENEMRTQLRRQAAAHTDHLRDVLRVQEQELKSEFEQNLSEKLSEQELQFRRLSQEQVDNFTLDINTAYARLRGIEQAVQSHAVAEEEARKAHQLWLSVEALKYSMKTSSAETPTIPLGSAVEAIKANCSDNEFTQALTAAIPPESLTRGVYSEETLRARFYAVQKLARRVAMIDETRNSLYQYFLSYLQSLLLFPPQQLKPPPELCPEDINTFKLLSYASYCIEHGDLELAAKFVNQLKGESRRVAQDWLKEARMTLETKQIVEILTAYASAVGIGTTQVQPE

SEQ ID NO: 1972 - protein, 955 aa, Homo sapiens
MSKTNKSKSGSRSSRSRSASRSRSRSFSKSRSRSRSLSRSRKRRLSSRSRSRSYSPAHNRERNHPRVYQNRDFRGHNRGYRRPYYFRGRNRGFYPWGQYNRGGYGNYRSNWQNYRQAYSPRRGRSRSRSPKRRSPSPRSRSHSRNSDKSSSDRSRRSSSSRSSSNHSRVESSKRKSAKEKKSSSKDSRPSQAAGDNQGDEAKEQTFSGGTSQDTKASESSKPWPDATYGTGSASRASAVSELSPRERSPALKSPLQSVVVRRRSPRPSPVPKPSPPLSSTSQMGSTLPSGAGYQSGTHQGQFDHGSGSLSPSKKSPVGKSPPSTGSTYGSSQKEESAASGGAAYTKRYLEEQKTENGKDKEQKQTNTDKEKIKEKGSFSDTGLGDGKMKSDSFAPKTDSEKPFRGSQSPKRYKLRDDFEKKMADFHKEEMDDQDKDKAKGRKESEFDDEPKFMSKVIGANKNQEEEKSGKWEGLVYAPPGKEKQRKTEELEEESFPERSKKEDRGKRSEGGHRGFVPEKNFRVTAYKAVQEKSSSPPPRKTSESRDKLGAKGDFPTGKSSFSITREAQVNVRMDSFDEDLARPSGLLAQERKLCRDLVHSNKKEQEFRSIFQHIQSAQSQRSPSELFAQHIVTIVHHVKEHHFGSSGMTLHERFTKYLKRGTEQEAAKNKKSPEIHRRIDISPSTFRKHGLAHDEMKSPREPGYKAEGKYKDDPVDLRLDIERRKKHKERDLKRGKSRESVDSRDSSHSRERSAEKTEKTHKGSKKQKKHRRARDRSRSSSSSSQSSHSYKAEEYTEETEEREESTTGFDKSRLGTKDFVGPSERGGGRARGTFQFRARGRGWGRGNYSGNNNNNSNNDFQKRNREEEWDPEYTPKSKKYYLHDDREGEGSDKWVSRGRGRGAFPRGRGRFMFRKSSTSPKWAHDKFSGEEGEIEDDESGTENREEKDNIQPTTE

SEQ ID NO: 1973 - protein, 435 aa, Homo sapiens
MIGGLFIYNHKGEVLISRVYRDDIGRNAVDAFRVNVIHARQQVRSPVTNIARTSFFHVKRSNIWLAAVTKQNVNAAMVFEFLYKMCDVMAAYFGKISEENIKNNFVLIYELLDEILDFGYPQNSETGALKTFITQQGIKSQMQTKEEQSQITSQVTGQIGWRREGIKYRRNELFLDVLESVNLLMSPQGQVLSAHVSGRVVMKSYLSGMPECKFGMNDKIVIEKQGKGTADETSKSGKQSIAIDDCTFHQCVRLSKFDSERSISFIPPDGEFELMRYRTTKDIILPFRVIPLVREVGRTKLEVKVVIKSNFKPSLLAQKIEVRIPTPLNTSGVQVICMKGKAKYKASENAIVWKIKRMAGMKESQISAEIELLPTNDKKKWARPPISMNFEVPFAPSGLKVRYLKVFEPKLNYSDHDVIKWVRYIGRSGIYETRC

SEQ ID NO: 1974 - protein, 750 aa, Homo sapiens
MGKSESQMDITDINTPKPKKKQRWTPLEISLSVLVLLLTIIAVTMIALYATYDDGICKSSDCIKSAARLIQNMDATTEPCTDFFKYACGGWLKRNVIPETSSRYGNFDILRDELEVVLKDVLQEPKTEDIVAVQKAKALYRSCINESAIDSRGGEPLLKLLPDIYGWPVATENWEQKYGASWTAEKAIAQLNSKYGKKVLINLFVGTDDKNSVNHVIHIDQPRLGLPSRDYYECTGIYKEACTAYVDFMISVARLIRQEERLPIDENQLALEMNKVMELEKEIANATAKPEDRNDPMLLYNKMTLAQIQNNFSLEINGKPFSWLNFTNEIMSTVNISITNEEDVVVYAPEYLTKLKPILTKYSARDLQNLMSWRFIMDLVSSLSRTYKESRNAFRKALYGTTSETATWRRCANYVNGNMENAVGRLYVEAAFAGESKHVVEDLIAQIREVFIQTLDDLTWMDAETKKRAEEKALAIKERIGYPDDIVSNDNKLNNEYLELNYKEDEYFENIIQNLKFSQSKQLKKLREKVDKDEWISGAAVVNAFYSSGRNQIVFPAGILQPPFFSAQQSNSLNYGGIGMVIGHEITHGFDDNGRNFNKDGDLVDWWTQQSASNFKEQSQCMVYQYGNFSWDLAGGQHLNGINTLGENIADNGGLGQAYRAYQNYIKKNGEEKLLPGLDLNHKQLFFLNFAQVWCGTYRPEYAVNSIKTDVHSPGNFRIIGTLQNSAEFSEAFHCRKNSYMNPEKKCRVW

SEQ ID NO: 1975 - protein, 379 aa, Homo sapiens
MAGDGRRAEAVREGWGVYVTPRAPIREGRGRLAPQNGGSSDAPAYRTPPSRQGRREVRFSDEPPEVYGDFEPLVAKERSPVGKRTRLEEFRSDSAKEEVRESAYYLRSRQRRQPRPQETEEMKTRRTTRLQQQHSEQPPLQPSPVMTRRGLRDSHSSEEDEASSQTDLSQTISKKTVRSIQEAPAVSEDLVIRLRRPPLRYPRYEATSVQQKVNFSEEGETEEDDQDSSHSSVTTVKARSRDSDESGDKTTRSSSQYIESFWQSSQSQNFTAHDKQPSVLTAGSTLIFYKYCDHENAAFKDVALVLTVLLEEETLGTSLGLKEVEEKVRDFLKVKFTNSNTPNSYNHMDPDKLNGLWSRISHLVLPVQPENALKRGICL

SEQ ID NO: 1976 - protein, 142 aa, Homo sapiens
MAAVVAATALKGRGARNARVLRGILAGATANKASHNRTRALQSHSSPEGKEEPEPLSPELEYIPRKRGKNPMKAVGLAWAIGFPCGILLFILTKREVDKDRVKQMKARQNMRLSNTGEYESQRFRASSQSAPSPDVGSGVQT

SEQ ID NO: 1977 - protein, 3024 aa, Homo sapiens
MVSDRTTPIIPLVDELPVIPTEFPPVGNIVSFEQKATVQPQAITDSLATKLPTPTGSTKKPWDMDDYSPSASGPLGKLDISEIKEEVLQSTTGVSHYATDSWDGVVEDKQTQESVTQIEQIEVGPLVTSMEILKHIPSKEFPVTETPLVTARMILESKTEKKMVSTVSELVTTGHYGFTLGEEDDEDRTLTVGSDESTLIFDQIPEVITVSKTSEDTIHTHLEDLESVSASTTVSPLIMPDNNGSSMDDWEERQTSGRITEEFLGKYLSTTPFPSQHRTEIELFPYSGDKILVEGISTVIYPSLQTEMTHRRERTETLIPEMRTDTYTDEIQEEITKSPFMGKTEEEVFSGMKLSTSLSEPIHVTESSVEMTKSFDFPTLITKLSAEPTEVRDMEEDFTATPGTTKYDENITTVLLAHGTLSVEAATVSKWSWDEDNTTSKPLESTEPSASSKLPPALLTTVGMNGKDKDIPSFTEDGADEFTLIPDSTQKQLEEVTDEDIAAHGKFTIRFQPTTSTGIAEKSTLRDSTTEEKVPPITSTEGQVYATMEGSALGEVEDVDLSKPVSTVPQFAHTSEVEGLAFVSYSSTQEPTTYVDSSHTIPLSVIPKTDWGVLVPSVPSEDEVLGEPSQDILVIDQTRLEATISPETMRTTKITEGTTQEEFPWKEQTAEKPVPALSSTAWTPKEAVTPLDEQEGDGSAYTVSEDELLTGSERVPVLETTPVGKIDHSVSYPPGAVTEHKVKTDEVVTLTPRIGPKVSLSPGPEQKYETEGSSTTGFTSSLSPFSTHITQLMEETTTEKTSLEDIDLGSGLFEKPKATELIEFSTIKVTVPSDITTAFSSVDRLHTTSAFKPSSAITKKPPLIDREPGEETTSDMVIIGESTSHVPPTTLEDIVAKETETDIDREYFTTSSPPATQPTRPPTVEDKEAFGPQALSTPQPPASTKFHPDINVYIIEVRENKTGRMSDLSVIGHPIDSESKEDEPCSEETDPVHDLMAEILPEFPDIIEIDLYHSEENEEEEEECANATDVTTTPSVQYINGKHLVTTVPKDPEAAEARRGQFESVAPSQNFSDSSESDTHPFVIAKTELSTAVQPNESTETTESLEVTWKPETYPETSEHFSGGEPDVFPTVPFHEEFESGTAKKGAESVTERDTEVGHQAHEHTEPVSLFPEESSGEIAIDQESQKIAFARATEVTFGEEVEKSTSVTYTPTIVPSSASAYVSEEEAVTLIGNPWPDDLLSTKESWVEATPRQVVELSGSSSIPITEGSGEAEEDEDTMFTMVTDLSQRNTTDTLITLDTSRIITESFFEVPATTIYPVSEQPSAKVVPTKFVSETDTSEWISSTTVEEKKRKEEEGTTGTASTFEVYSSTQRSDQLILPFELESPNVATSSDSGTRKSFMSLTTPTQSEREMTDSTPVFTETNTLENLGAQTTEHSSIHQPGVQEGLTTLPRSPASVFMEQGSGEAAADPETTTVSSFSLNVEYAIQAEKEVAGTLSPHVETTFSTEPTGLVLSTVMDRVVAENITQTSREIVISERLGEPNYGAEIRGFSTGFPLEEDFSGDFREYSTVSHPIAKEETVMMEGSGDAAFRDTQTSPSTVPTSVHISHISDSEGPSSTMVSTSAFPWEEFTSSAEGSGEQLVTVSSSVVPVLPSAVQKFSGTASSIIDEGLGEVGTVNEIDRRSTILPTAEVEGTKAPVEKEEVKVSGTVSTNFPQTIEPAKLWSRQEVNPVRQEIESETTSEEQIQEEKSFESPQNSPATEQTIFDSQTFTETELKTTDYSVLTTKKTYSDDKEMKEEDTSLVNMSTPDPDANGLESYTTLPEATEKSHFFLATALVTESIPAEHVVTDSPIKKEESTKHFPKGMRPTIQESDTELLFSGLGSGEEVLPTLPTESVNFTEVEQINNTLYPHTSQVESTSSDKIEDFNRMENVAKEVGPLVSQTDIFEGSGSVTSTTLIEILSDTGAEGPTVAPLPFSTDIGHPQNQTVRWAEEIQTSRPQTITEQDSNKNSSTAEINETTTSSTDFLARAYGFEMAKEFVTSAPKPSDLYYEPSGEGSGEVDIVDSFHTSATTQATRQESSTTFVSDGSLEKHPEVPSAKAVTADGFPTVSVMLPLHSEQNKSSPDPTSTLSNTVSYERSTDGSFQDRFREFEDSTLKPNRKKPTENIIIDLDKEDKDLILTITESTILEILPELTSDKNTIIDIDHTKPVYEDILGMQTDIDTEVPSEPHDSNDESNDDSTQVQEIYEAAVNLSLTEETFEGSADVLASYTQATHDESMTYEDRSQLDHMGFHFTTGIPAPSTETELDVLLPTATSLPIPRKSATVIPEIEGIKAEAKALDDMFESSTLSDGQAIADQSEIIPTLGQFERTQEEYEDKKHAGPSFQPEFSSGAEEALVDHTPYLSIATTHLMDQSVTEVPDVMEGSNPPYYTDTTLAVSTFAKLSSQTPSSPLTIYSGSEASGHTEIPQPSALPGIDVGSSVMSPQDSFKEIHVNIEATFKPSSEEYLHITEPPSLSPDTKLEPSEDDGKPELLEEMEASPTELIAVEGTEILQDFQNKTDGQVSGEAIKMFPTIKTPEAGTVITTADEIELEGATQWPHSTSASATYGVEAGVVPWLSPQTSERPTLSSSPEINPETQAALIRGQDSTIAASEQQVAARILDSNDQATVNPVEFNTEVATPPFSLLETSNETDFLIGINEESVEGTAIYLPGPDRCKMNPCLNGGTCYPTETSYVCTCVPGYSGDQCELDFDECHSNPCRNGATCVDGFNTFRCLCLPSYVGALCEQDTETCDYGWHKFQGQCYKYFAHRRTWDAAERECRLQGAHLTSILSHEEQMFVNRVGHDYQWIGLNDKMFEHDFRWTDGSTLQYENWRPNQPDSFFSAGEDCVVIIWHENGQWNDVPCNYHLTYTCKKGTVACGQPPVVENAKTFGKMKPRYEINSLIRYHCKDGFIQRHLPTIRCLGNGRWAIPKITCMNPSAYQRTYSMKYFKNSSSAKDNSINTSKHDHRWSRRWQESRR

SEQ ID NO: 1978 - protein, 148 aa, Homo sapiens
MGHALCVCSRGTVIIDNKRYLFIQKLGEGGFSYVDLVEGLHDGHFYALKRILCHEQQDREEAQREADMHRLFNHPNILRLVAYCLRERGAKHEAWLLLPFFKRGTLWNEIERLKDKGNFLTEDQILWLLLGICRGLELIMPRVMPTET

SEQ ID NO: 1979 - protein, 176 aa, Homo sapiens
MSRRRKGRGLLAPKGPRTSQKRSFRRGWGRLKVEIKATQRARRRRRNPTREKKTKKKKKRRRKQKRPQPKILSHRPRRKRRKRRRQQSRLYDEHQHQAQGFPSRAVAIPMPLTSTDLCPPWVGTKLLPSLAPQKKTASFRGPCAGQASEPAGRLVQGESGPAPMTSPHSPNTGRFI

SEQ ID NO: 1980 - protein, 393 aa, Homo sapiens
MPQLSGGGGGGGGDPELCATDEMIPFKDEGDPQKEKIFAEISHPEEEGDLADIKSSLVNESEIIPASNGHEVARQAQTSQEPYHDKAREHPDDGKHPDGGLYNKGPSYSSYSGYIMMPNMNNDPYMSNGSLSPPIPRTSNKVPVVQPSHAVHPLTPLITYSDEHFSPGSHPSHIPSDVNSKQGMSRHPPAPDIPTFYPLSPGGVGQITPPLGWQGQPVYPITGGFRQPYPSSLSVDTSMSRFSHHMIPGPPGPHTTGIPHPAIVTPQVKQEHPHTDSDLMHVKPQHEQRKEQEPKRPHIKKPLNAFMLYMKEMRANVVAECTLKESAAINQILGRRWHALSREEQAKYYELARKERQLHMQLYPGWSARDNYVRKRRGRERNYRNLHQVQVQE

SEQ ID NO: 1981 - protein, 1539 aa, Homo sapiens
MDSYFKAAVSDLDKLLDDFEQNPDEQDYLQDVQNAYDSNHCSVSSELASSQRTSLLPKDQECVNSCASSETSYGTNESSLNEKTLKGLTSIQNEKNVTGLDLLSSVDGGTSDEIQPLYMGRCSKPICDLISDMGNLVHATNSEEDIKKLLPDDFKSNADSLIGLDLSSVSDTPCVSSTDHDSDTVREQQNDISSELQNREIGGIKELGIKVDTTLSDSYNYSGTENLKDKKIFNQLESIVDFNMSSALTRQSSKMFHAKDKLQHKSQPCGLLKDVGLVKEEVDVAVITAAECLKEEGKTSALTCSLPKNEDLCLNDSNSRDENFKLPDFSFQEDKTVIKQSAQEDSKSLDLKDNDVIQDSSSALHVSSKDVPSSLSCLPASGSMCGSLIESKARGDFLPQHEHKDNIQDAVTIHEEIQNSVVLGGEPFKENDLLKQEKCKSILLQSLIEGMEDRKIDPDQTVIRAESLDGGDTSSTVVESQEGLSGTHVPESSDCCEGFINTFSSNDMDGQDLDYFNIDEGAKSGPLISDAELDAFLTEQYLQTTNIKSFEENVNDSKSQMNQIDMKGLDDGNINNIYFNAEAGAIGESHGINIICEIVDKQNTIENGLSLGEKSTIPVQQGLPTSKSEITNQLSVSDINSQSVGGARPKQLFSLPSRTRSSKDLNKPDVPDTIESEPSTADTVVPITCAIDSTADPQVSFNSNYIDIESNSEGGSSFVTANEDSVPENTCKEGLVLGQKQPTWVPDSEAPNCMNCQVKFTFTKRRHHCRACGKVFCGVCCNRKCKLQYLEKEARVCVVCYETISKAQAFERMMSPTGSNLKSNHSDECTTVQPPQENQTSSIPSPATLPVSALKQPGVEGLCSKEQKRVWFADGILPNGEVADTTKLSSGSKRCSEDFSPLSPDVPMTVNTVDHSHSTTVEKPNNETGDITRNEIIQSPISQVPSVEKLSMNTGNEGLPTSGSFTLDDDVFAETEEPSSPTGVLVNSNLPIASISDYRLLCDINKYVCNKISLLPNDEDSLPPLLVASGEKGSVPVVEEHPSHEQIILLLEGESFHPVTFVLNANLLVNVKFIFYSSDKYWYFSTNGLHGLGQAEIIILLLCLPNEDTIPKDIFRLFITIYKDALKGKYIENLDNITFTESFLSSKDHGGFLFITPTFQKLDDLSLPSNPFLCGILIQKLEIPWAKVFPMRLMLRLGAEYKAYPAPLTSIRGRKPLFGEIGHTIMNLLVDLRNYQYTLHNIDQLLIHMEMGKSCIKIPRKKYSDVMKVLNSSNEHVISIGASFSTEADSHLVCIQNDGIYETQANSATGHPRKVTGASFVVFNGALKTSSGFLAKSSIVEDGLMVQITPETMNGLRLALREQKDFKITCGKVDAVDLREYVDICWVDAEEKGNKGVISSVDGISLQGFPSEKIKLEADFETDEKIVKCTEVFYFLKDQDLSILSTSYQFAKEIAMACSAALCPHLKTLKSNGMNKIGLRVSIDTDMVEFQAGSEGQLLPQHYLNDLDSALIPVIHGGTSNSSLPLEIELVFFIIEHLF

SEQ ID NO: 1982 - protein, 101 aa, Homo sapiens [sequence omitted]

SEQ ID NO: 1983 - protein, 1424 aa, Homo sapiens
MCENCADLVEVLNEISDVEGGDGLQLRKEHTLKIFTYINSWTQRQCLCCFKEYKHLEIFNQVVCALINLVIAQVQVLRDQLCKHCTTINIDSTWQDESNQAEEPLNIDRECNEGSTERQKSIEKKSNSTRICNLTEEESSKSSDPFSLWSTDEKEKLLLCVAKIFQIQFPLYTAYKHNTHPTIEDISTQESNILGAFCDMNDVEVPLHLLRYVCLFCGKNGLSLMKDCFEYGTPETLPFLIAHAFITVVSNIRIWLHIPAVMQHIIPFRTYVIRYLCKLSDQELRQSAARNMADLMWSTVKEPLDTTLCFDKESLDLAFKYFMSPTLTMRLAGLSQITNQLHTFNDVCNNESLVSDTETSIAKELADWLISNNVVEHIFGPNLHIEIIKQCQVILNFLAAEGRLSTQHIDCIWAAAQLKHCSRYIHDLFPSLIKNLDPVPLRHLLNLVSALEPSVHTEQTLYLASMLIKALWNNALAAKAQLSKQSSFASLLNTNIPIGNKKEEEELRRTAPSPWSPAASPQSSDNSDTHQSGGSDIEMDEQLINRTKHVQQRLSDTEESMQGSSDETANSGEDGSSGPGSSSGHSDGSSNEVNSSHASQSAGSPGSEVQSEDIADIEALKEEDEDDDHGHNPPKSSCGTDLRNRKLESQAGICLGDSQGMSERNGTSSGTGKDLVFNTESLPSVDNRMRMLDACSHSEDPEHDISGEMNATHIAQGSQESCITRTGDFLGETIGNELFNCRQFIGPQHHHHHHHHHHHHDGHMVDDMLSADDVSCSSSQVSAKSEKNMADFDGEESGCEEELVQINSHAELTSHLQQHLPNLASIYHEHLSQGPVVHKHQFNSNAVTDINLDNVCKKGNTLLWDIVQDEDAVNLSEGLINEAEKLLCSLVCWFTDRQIRMRFIEGCLENLGNNRSVVISLRLLPKLFGTFQQFGSSYDTHWITMWAEKELNMMKLFFDNLVYYIQTVREGRQKHALYSHSAEVQVRLQFLTCVFSTLGSPDHFRLSLEQVDILWHCLVEDSECYDDALHWFLNQVRSKDQHAMGMETYKHLFLEKMPQLKPETISMTGLNLFQHLCNLARLATSAYDGCSNSELCGMDQFWGIALRAQSGDVSRAAIQYINSYYINGKTGLEKEQEFISKCMESLMIASSSLEQESHSSLMVIERGLLMLKTHLEAFRRRFAYHLRQWQIEGTGISSHLKALSDKQSLPLRVVCQPAGLPDKMTIEMYPSDQVADLRAEVTHWYENLQKEQINQQAQLQEFGQSNRKGEFPGGLMGPVRMISSGHELTTDYDEKALHELGFKDMQMVFVSLGAPRRERKGEGVQLPASCLPPPQKDNIPMLLLLQEPHLTTLFDLLEMLASFKPPSGKVAVDDSESLRCEELHLHAENLSRRVWELLMLLPTCPNMLMAFQNISDEQSFKSSV

SEQ ID NO: 1984 - protein, 594 aa, Homo sapiens
MAAFSEMGVMPEIAQAVEEMDWLLPTDIQAESIPLILGGGDVLMAAETGSGKTGAFSIPVIQIVYETLKDQQEGKKGKTTIKTGASVLNKWQMNPYDRGSAFAIGSDGLCCQSREVKEWHGCRATKGLMKGKHYYEVSCHDQGLCRVGWSTMQASLDLGTDKFGFGFGGTGKKSHNKQFDNYGEEFTMHDTIGCYLDIDKGHVKFSKNGKDLGLAFEIPPHMKNQALFPACVLKNAELKFNFGEEEFKFPPKDGFVALSKAPDGYIVKSQHSGNAQVTQTKFLPNAPKALIVEPSRELAEQTLNNIKQFKKYIDNPKLRELLIIGGVAARDQLSVLENGVDIVVGTPGRLDDLVSTGKLNLSQVRFLVLDEADGLLSQGYSDFINRMHNQIPQVTSDGKRLQVIVCSATLHSFDVKKLSEKIMHFPTWVDLKGEDSVPDTVHHVVVPVNPKTDRLWERLGKSHIRTDDVHAKDNTRPGANSPEMWSEAIKILKGEYAVRAIKEHKMDQAIIFCRTKIDCDNLEQYFIQQGGGPDKKGHQFSCVCLHGDRKPHERKQNLERFKKGDVRFLICTDVAARGIDIHGVPYGYKCHSAR

SEQ ID NO: 1985 - protein, 796 aa, Homo sapiens
MSLPLTEEQRKKIEENRQKALARTAEKLLAEQHQRTSSGTSIAGNPFQAKQGPSQNFPRESCKPVSHGVIFKQQNLSSSSNADQRPHDSHSFQAKGIWKKPEEMPTACPGHSPRSQMALTGISPPLAQSPPEVPKQQLLSYELGQGHAQASPEIRFTPFANPTHKPLAKPKSSQETPAHSSGQPPRDAKLEAKTAKASPSGQNISYIHSSSESVTPRTEGRLQQKSGSSVQKGVNSQKGKCVRNGDRFQVLIGYNAELIAVFKTLPSKNYDPDTKTWNFSMNDYSALMKAAQSLPTVNLQPLEWAYGSSESPSTSSEGQAGLPSAPSLSFVKGRCMLISRAYFEADISYSQDLIALFKQMDSRRYDVKTRKWSFLLEEHSKLIAKVRCLPQVQLDPLPTTLTLAFASQLKKTSLSLTPDVPEADLSEVDPKLVSNLMPFQRAGVNFAIAKGGRLLLADDMGLGKTIQAICIAAFYRKEWPLLVVVPSSVRFTWEQAFLRWLPSLSPDCINVVVTGKDRLTAGLINIVSFDLLSKLEKQLKTPFKVVIIDESHFLKNSRTARCRAAMPVLKVAKRVILLSGTPAMSRPAELYTQIIAVKPTFFPQFHAFGLRYCDAKRMPWGWDYSGSSNLGELKLLLEEAVMLRRLKSDVLSQLPAKQRKIVVIAPGRINARTRAALDAAAKEMTTKDKTKQQQKDALILFFNRTAEAKIPSVIEYILDLLESGREKFLVFAHHKVVLDAITQELERKHVQHIRIDGSTSSAEREDLCQHVTTVGEACCGRAVHHRCQYGPHLLLG

SEQ ID NO: 1986 - protein, 940 aa, Homo sapiens
MKLLGRQQPDTELEIQQKCGFSELYSWQRERKVKTEFCLHDGPPYANGDPHVGHALNKILKDIANRFHMMNGSKIHFVPGWDCHGLPIEIKVLSELGREAQNLSAMEIRKKARSFAKAAIEKQKSAFIRWGIMADWNNCYYTFDGKYEAKQLRTFYQMYDKGLVYRSYKPVFWSPSSRTALAEAELEYNPEHVSRSIYVKFPLLKPSPKLASLIDGSSPVSILVWTTQPWTIPANEAVCYMPESKYAVVKCSKSGDLYVLAADKVASVASTLETTFETISTLSGVDLENGTCSHPLIPDKASPLLPANHVTMAKGTGLVHTAPAHGMEDYGVASQHNLPMDCLVDEDGVFTDVAGPELQNKAVLEEGTDVVIKMLQTAKNLLKEEKLVHSYPYDWRTKKPVVIRASKQWFINITDIKTAAKELLKKVKFIPGSALNGMVEMMDRRPYWCISRQRVWGVPIPVFHHKTKDEYLINSQTTEHIVKLVEQHGSDIWWTLPPEQLLPKEVLSEVGGPDALEYVPGQDILDIWFDSGTSWSYVLPGPDQRADLYLEGKDQLGGWFQSSLLTSVAARKRAPYKTVIVHGFTLGEKGEKMSKSLGNVIHPDVVVNGGQDQSKEPPYGADVLRWWVADSNVFTEVAIGPSVLNAARDDISKLRNTLRFLLGNVADFNPETDSIPVNDMYVIDQYMLHLLQDLANKITELYKQYDFGKVVRLLRTFYTRELSNFYFSIIKDRLYCEKENDPKRRSCQTALVEILDVIVRSFAPILPHLAEEVFQHIPYIKEPKSVFRTGWISTSSIWKKPGLEEAVESACAMRDSFLGSIPGKNAAEYKVITVIEPGLLFEIIEMLQSEETSSTSQLNELMMASESTLLAQEPREMTADVIELKGKFLINLEGGDIREESSYKVIVMPTTKEKCPRCWKYTAESSDTLCPRCAEVVSGK

SEQ ID NO: 1987 - protein, 443 aa, Homo sapiens
MDELLKEIQAMSQCSHPNVVTYYTSFVVKDELWLVMKLLSGGSMLDIIKYIVNRGEHKNGVLEEAIIATILKEVLEGLDYLHRNGQIHRDLKAGNILLGEDGSVQIADFGVSAFLATGGDVTRNKVRKTFVGTPCWMAPEVMEQVRGYDFKADMWSFGITAIELATGAAPYHKYPPMKVLMLTLQNDPPTLETGVEDKEMMKKYGKSFRKLLSLCLQKDPSKRPTAAELLKCKFFQKAKNREYLIEKLLTRTPDIAQRAKKVRRVPGSSGHLHKTEDGDWEWSDDEMDEKSEEGKAAFSQEKSRRVKEENPEIAVSASTIPEQIQSLSVHDSQGPPNANEDYREASSCAVNLVLRLRNSRKELNDIRFEFTPGRDTADGVSQELFSAGLVDGHDVVIVAANLQKIVDDPKALKTLTFKLASGCDGSEIPDEVKLIGFAQLSVS

SEQ ID NO: 1988 - protein, 706 aa, Homo sapiens
MASPADSCIQFTRHASDVLLNLNRLRSRDILTDVVIVVSREQFRAHKTVLMACSGLFYSIFTDQLKCNLSVINLDPEINPEGFCILLDFMYTSRLNLREGNIMAVMATAMYLQMEHVVDTCRKFIKASEAEMVSAIKPPREEFLNSRMLMPQDIMAYRGREVVENNLPLRSAPGCESRAFAPSLYSGLSTPPASYSMYSHLPVSSLLFSDEEFRDVRMPVANPFPKERALPCDSARPVPGEYSRPTLEVSPNVCHSNIYSPKETIPEEARSDMHYSVAEGLKPAAPSARNAPYFPCDKASKEEERPSSEDEIALHFEPPNAPLNRKGLVSPQSPQKSDCQPNSPTESCSSKNACILQASGSPPAKSPTDPKACNWKKYKFIVLNSLNQNAKPEGPEQAELGRLSPRAYTAPPACQPPMEPENLDLQSPTKLSASGEDSTIPQASRLNNIVNRSMTGSPRSSSESHSPLYMHPPKCTSCGSQSPQHAEMCLHTAGPTFPEEMGETQSEYSDSSCENGAFFCNECDCRFSEEASLKRHTLQTHSDKPYKCDRCQASFRYKGNLASHKTVHTGEKPYRCNICGAQFNRPANLKTHTRIHSGEKPYKCETCGARFVQVAHLRAHVLIHTGEKPYPCEICGTRFRHLQTLKSHLRIHTGEKPYHCEKCRLHFRHKSQLRLHLRQKHGAITNTKVQYRVSATDLPPELPKAC

SEQ ID NO: 1989 - protein, 442 aa, Homo sapiens
MYQRMLRCGAELGSPGGGGGGGGGGGAGGRLALLWIVPLTLSGLLGVAWGASSLGAHHIHHFHGSSKHHSVPIAIYRSPASLRGGHAGTTYIFSKGGGQITYKWPPNDRPSTRADRLAIGFSTVQKEAVLVRVDSSSGLGDYLELHIHQGKIGVKFNVGTDDIAIEESNAIINDGKYHVVRFTRSGGNATLQVDSWPVIERYPAGRQLTIFNSQATIIIGGKEQGQPFQGQLSGLYYNGLKVLNMAAENDANIAIVGNVRLVGEVPSSMTTESTATAMQSEMSTSIMETTTTLATSTARRGKPPTKEPISQTTDDILVASAECPSDDEDIDPCEPSSGGLANPTRAGGREPYPGSAEVIRESSSTTGMVVGIVAAAALCILILLYAMYKYRNRDEGSYHVDESRNYISNSAQSNGAVVKEKQPSSAKSSNKNKKNKDKEYYV

SEQ ID NO: 1990 - protein, 462 aa, Homo sapiens
MQLRKMQTVKKEQASLDASSNVDKMMVLNSALTEVSEDSTTGEELLLSEGSVGKNKSSACRRKREFIPDEKKDAMYWEKRRKNNEAAKRSREKRRLNDLVLENKLIALGEENATLKAELLSLKLKFGLISSTAYAQEIQKLSNSTAVYFQDYQTSKSNVSSFVDEHEPSMVSSSCISVIKHSPQSSLSDVSEVSSVEHTQESSVQGSCRSPENKFQIIKQEPMELESYTREPRDDRGSYTASIYQNYMGNSFSGYSHSPPLLQVNRSSSNSPRTSETDDGVVGKSSDGEDEQQVPKGPIHSPVELKHVHATVVKVPEVNSSALPHKLRIKAKAMQIKVEAFDNEFEATQKLSSPIDMTSKRHFELEKHSAPSMVHSSLTPFSVQVTNIQDWSLKSEHWHQKELSGKTQNSFKTGVVEMKDSGYKVSDPENLYLKQGIANLSAEVVSLKRLIATQPISASDSG

SEQ ID NO: 1991 - protein, 124 aa, Homo sapiens
MFCVCVWCAPSSHCLNSLKSPHVSPTGSPQTTSEGLTCCHSLLLPQSRVMRMDGVQGFRWGLRRCPCWPCPSWLSRPGFTVQLHLYAGRGADSSGTPWFWIPFLGSLWRQPGFSGAASQQLSQG

SEQ ID NO: 1992 - protein, 1417 aa, Homo sapiens
MGAMEINRNIRFATYTKENGRTLVVQDEPVGGDTPASFTPYSTATGQTPLAPEVGGAENKEAGKTLEQVGQGIVASAAVVTTASSTPNTVRISDTGLAAGTVPEKQKGSRSQASGENSRNSILASSGFGAPLPSSSQPLTFGSGRSQSNGVLATENKPLGFSFGCSSAQEAQKDTDLSKNLFFQCMSQTLPTSNYFTTVSESLADDSSSRDSFKQSLESLSSGLCKGRSVLGTDTKPGSKAGSSVDRKVPAESMPTLTPAFPRSLLNARTPENHENLFLQPPKLSREEPSNPFLAFVEKVEHSPFSSFASQASGSSSSATTVTSKVAPSWPESHSSADSASLAKKKPLFITTDSSKLVSGVLGSALTSGGPSLSAMGNGRSSSPTSSLTQPIEMPTLSSSPTEERPTVGPGQQDNPLLKTFSNVFGRHSGGFLSSPADFSQENKAPFEAVKRFSLDERSLACRQDSDSSTNSDLSDLSDSEEQLQAKTGLKGIPEHLMGKLGPNGERSAELLLGKSKGKQAPKGRPRTAPLKVGQSVLKDVSKVKKLKQSGEPFLQDGSCINVAPHLHKCRECRLERYRKFKEQEQDDSTVACRFFHFRRLIFTRKGVLRVEGFLSPQQSDPDAMNLWIPSSSLAEGIDLETSKYILANVGDQFCQLVMSEKEAMMMVEPHQKVAWKRAVRGVREMCDVCETTLFNIHWVCRKCGFGVCLDCYRLRKSRPRSETEEMGDEEVFSWLKCAKGQSHEPENLMPTQIIPGTALYNIGDMVHAARGKWGIKANCPCISRQNKSVLRPAVTNGMSQLPSINPSASSGNETTFSGGGGPAPVTTPEPDHVPKADSTDIRSEEPLKTDSSASNSNSELKAIRPPCPDTAPPSSALHWLADLATQKAKEETKEAGSLRSVLNKESHSPFGLDSFNSTAKVSPLTPKLFNSLLLGPTASNNKTEGSSLRDLLHSGPGKLPQTPLDTGIPFPPVFSTSSAGVKSKASLPNFLDHIIASVVENKKTSDASKRACNLTDTQKEVKEMVMGLNVLDPHTSHSWLCDGRLLCLHDPSNKNNWKIFRECWKQGQPVLVSGVHKKLKSELWKPEAFSQEFGDQDVDLVNCRNCAIISDVKVRDFWDGFEIICKRLRSEDGQPMVLKLKDWPPGEDFRDMMPTRFEDLMENLPLPEYTKRDGRLNLASRLPSYFVRPDLGPKMYNAYGLITAEDRRVGTTNLHLDVSDAVNVMVYVGIPIGEGAHDEEVLKTIDEGDADEVTKQRIHDGKEKPGALWHIYAAKDAEKIRELLRKVGEEQGQENPPDHDPIHDQSWYLDQTLRKRLYEEYGVQGWAIVQFLGDAVFIPAGAPHQVHNLYSCIKVAEDFVSPEHVKHCFRLTQEFRHLSNTHTNHEDKLQVKNIIYHAVKDAVGTLKAHESKLARS

SEQ ID NO: 1993 - protein, 305 aa, Homo sapiens
MGIQTSPVLLASLGVGLVTLLGLAVGSYLVRRSRRPQVTLLDPNEKYLLRLLDKTTVSHNTKRFRFALPTAHHTLGLPVGKHIYLSTRIDGSLVIRPYTPVTSDEDQGYVDLVIKVYLKGVHPKFPEGGKMSQYLDSLKVGDVVEFRGPSGLLTYTGKGHFNIQPNKKSPPEPRVAKKLGMIAGGTGITPMLQLIRAILKVPEDPTQCFLLFANQTEKDIILREDLEELQARYPNRFKLWFTLDHPPKDWAYSKGFVTADMIREHLPAPGDDVLVLLCGPPPMVQLACHPNLDKLGYSQKMRFTY

SEQ ID NO: 1994 - protein, 480 aa, Homo sapiens
MAASVVCRAATAGAQVLLRARRSPALLRTPALRSTATFAQALQFVPETQVSLLDNGLRVASEQSSQPTCTVGVWIDVGSRFETEKNNGAGYFLEHLAFKGTKNRPGSALEKEVESMGAHLNAYSTREHTAYYIKALSKDLPKAVELLGDIVQNCSLEDSQIEKERDVILREMQENDASMRDVVFNYLHATAFQGTPLAQAVEGPSENVRKLSRADLTEYLSTHYKAPRMVLAAAGGVEHQQLLDLAQKHLGGIPWTYAEDAVPTLTPCRFTGSEIRHRDDALPFAHVAIAVEGPGWASPDNVALQVANAIIGHYDCTYGGGVHLSSPLASGAVANKLCQSFQTFSICYAETGLLGAHFVCDRMKIDDMMFVLQGQWMRLCTSATESEVARGKNILRNALVSHLDGTTPVCEDIGRSLLTYGRRIPLAEWESRIAEVDASVVREICSKYIYDQCPAVAGYGPIEQLPDYNRIRSGMFWLRF

SEQ ID NO: 1995 - protein, 1302 aa, Homo sapiens
MKAEDYDVVKVIGRGAFGEVQLVRHKASQKVYAMKLLSKFEMIKRSDSAFFWEERDIMAFANSPWVVQLFYAFQDDRYLYMVMEYMPGGDLVNLMSNYDVPEKWAKFYTAEVVLALDAIHSMGLIHRDVKPDNMLLDKHGHLKLADFGTCMKMDETGMVHCDTAVGTPDYISPEVLKSQGGDGFYGRECDWWSVGVFLYEMLVGDTPFYADSLVGTYSKIMDHKNSLCFPEDAEISKHAKNLICAFLTDREVRLGRNGVEEIRQHPFFKNDQWHWDNIRETAAPVVPELSSDIDSSNFDDIEDDKGDVETFPIPKAFVGNQLPFIGFTYYRENLLLSDSPSCRETDSIQSRKNEESQEIQKKLYTLEEHLSNEMQAKEELEQKCKSVNTRLEKTAKELEEEITLRKSVESALRQLEREKALLQHKNAEYQRKADHEADKKRNLENDVNSLKDQLEDLKKRNQNSQISTEKVNQLQRQLDETNALLRTESDTAARLRKTQAESSKQIQQLESNNRDLQDKNCLLETAKLKLEKEFINLQSALESERRDRTHGSEIINDLQGRICGLEEDLKNGKILLAKVELEKRQLQERFTDLEKEKSNMEIDMTYQLKVIQQSLEQEEAEHKATKARLADKNKIYESIEEAKSEAMKEMEKKLLEERTLKQKVENLLLEAEKRCSLLDCDLKQSQQKINELLKQKDVLNEDVRNLTLKIEQETQKRCLTQNDLKMQTQQVNTLKMSEKQLKQENNHLMEMKMNLEKQNAELRKERQDADGQMKELQDQLEAEQYFSTLYKTQVRELKEECEEKTKLGKELQQKKQELQDERDSLAAQLEITLTKADSEQLARSIAEEQYSDLEKEKIMKELEIKEMMARHKQELTEKDATIASLEETNRTLTSDVANLANEKEELNNKLKDVQEQLSRLKDEEISAAAIKAQFEKQLLTERTLKTQAVNKLAEIMNRKEPVKRGNDTDVRRKEKENRKLHMELKSEREKLTQQMIKYQKELNEMQAQIAEESQIRIELQMTLDSKDSDIEQLRSQLQALHIGLDSSSIGSGPGDAEADDGFPESRLEGWLSLPVRNNTKKFGWVKKYVIVSSKKILFYDSEQDKEQSNPYMVLDIDKLFHVRPVTQTDVYRADAKEIPRIFQILYANEGESKKEQEFPVEPVGEKSNYICHKGHEFIPTLYHFPTNCEACMKPLWHMFKPPPALECRRCHIKCHKDHMDKKEEIIAPCKVYYDISTAKNLLLLANSTEEQQKWVSRLVKKIPKKPPAPDPFARSSPRTSMKIQQNQSIRRPSRQLAPNKPS

SEQ ID NO: 1996 - protein, 259 aa, Homo sapiens
MVEFYAPWCGHCKNLEPEWAAAASEVKEQTKGKVKLAAVDATVNQVLASRYGIRGFPTIKIFQKGESPVDYDGGRTRSDIVSRALDLFSDNAPPPELLEIINEDIAKRTCEEHQLCVVAVLPHILDTGAAGRNSYLEVLLKLADKYKKKMWGWLWTEAGAQSELETALGIGGFGYPAMAAINARKMKFALLKGSFSEQGINEFLRELSFGRGSTAPVGGGAFPTIVEREPWDGRDGELPVEDDIDLSDVELDDLGKDEL

SEQ ID NO: 1997 - protein, 824 aa, Homo sapiens
MESSTLQESPRARAEAVLLHEMDEDDLANALIWPEIQQELKIIESEEELSSLPPPALKTSPIQPILESSLGPFIPSEPPGSLPCGSFPAPVSTPLEVWTRDPANQSTQGASTAASREKPEPEQGLHPDLASLAPLEIVPFEKASPQATVEVGGPGNLSPPLPPAPPPPTPLEESTPVLLSKGGPEREDSSRKLRTDLYIDQLKSQDSPEISSLCQGEEATPRHSDKQNSKNAASEGKGCGFPSPTREVEIVSQEEEDVTHSVQEPSDCDEDDTVTDIAQHGLEMVEPWEEPQWVTSPLHSPTLKDAHKAQVQGLQGHQLEKRLSHRPSLRQSHSLDSKPTVKSQWTLEVPSSSSCANLETERNSDPLQPQAPRREITGWDEKALRSFREFSGLKGAEAPPNQKGPSGVQPNPAETSPISLAEGKELGTHLGHSSPQIRQGGVPGPESSKESSPSVQDSTSPGEHPAKLQLKSTECGPPKGKNRPSSLNLDPAIPIADLFWFENVASFSSPGMQVSEPGDPKVTWMTSSYCKADPWRVYSQDPQDLDIVAHALTGRRNSAPVSVSAVRTSFMVKMCQARAVPVIPPKIQYTQIPQPLPSQSSGENGVQPLERSQEGPSSTSGTTQKPAKDDSPSSLESSKEEKPKQDPGAIKSSPVDATAPCMCEGPTLSPEPGSSNLLSTQDAVVQCRKRMSETEPSGDNLLSSKLERPSGGSKPFHRSRPGRPQSLILFSPPFPIMDHLPPSSTVTDSKVLLSPIRSPTQTVSPGLLCGELAENTWVTPEGVTLRNKMTIPKNGQRLETSTSCFYQPQRRSVILDGRSGRQIE

SEQ ID NO: 1998 - protein, 489 aa, Homo sapiens
MKKHIPSAKNLDADIWKKFLSRPALPFILRLLRGLAIQHPGTQVLIGTDSIPNLHKLEQVSSDEGIGTLAENLLEALREHPDVNKKIDAARRETRAEKKRMAMAMRQKALGTLGMTTNEKGQVVTKTALLKQMEELIEEPGLTCCICREGYKFQPTKVLGIYTFTKRVALEEMENKPRKQQGYSTVSHFNIVHYDCHLAAVRLARGREEWESAALQNANTKCNGLLPVWGPHVPESAFATCLARHNTYLQECTGQREPTYQLNIHDIKLLFLRFAMEQSFSADTGGGGRESNIHLIPYIIHTVLYVLNTTRATSREEKNLQGFLEQPKEKWVESAFEVDGPYYFTVLALHILPPEQWRATRVEILRRLLVTSQARAVAPGGATRLTDKAVKDYSAYRSSLLFWALVDLIYNMFKKVPTSNTEGGWSCSLAEYIRHNDMPIYEAADKALKTFQEEFMPVETFSEFLDVAGLLSEITDPESFLKDLLNSVP

SEQ ID NO: 1999 - protein, 904 aa, Homo sapiens [sequence omitted]

SEQ ID NO: 2000 - protein, 711 aa, Homo sapiens [sequence omitted]

SEQ ID NO: 2001 - protein, 309 aa, Homo sapiens
MSWCNELRLPALKQHSIGRGLESHITMCIPPSYADLGKAARDIFNKGFGFGLVKLDVKTKSCSGVEFSTSGSSNTDTGKVTGTLETKYKWCEYGLTFTEKWNTDNTLGTEIAIEDQICQGLKLTFDTTFSPNTGKKSGKIKSSYKRECINLGCDVDFDFAGPAIHGSAVFGYEGWLAGYQMTFDSAKSKLTRNNFAVGYRTGDFQLHTNVNDGTEFGGSIYQKVCEDLDTSVNLAWTSGTNCTRFGIAAKYQLDPTASISAKVNNSSLIGVGYTQTLRPGVKLTLSALVDGKSINAGGHKVGLALELEA

SEQ ID NO: 2002 - protein, 387 aa, Homo sapiens
MESNKDEAERCISIALKAIQSNQPDRALRFLEKAQRLYPTPRVRALIESLNQKPQTAGDQPPPTDTTHATHRKAGGTDAPSANGEAGGESTKGYTAEQVAAVKRVKQCKDYYEILGVSRGASDEDLKKAYRRLALKFHPDKNHAPGATEAFKAIGTAYAVLSNPEKRKQYDQFGDDKSQAARHGHGHGDFHRGFEADISPEDLFNMFFGGGFPSSNVHVYSNGRMRYTYQQRQDRRDNQGDAGLGVFVQLMPILILILVSALSQLMVSSPPYSLSPRPSVGHIHRRVTDHLGVVYYVGDTFSEEYTGSSLKTVERNVEDDYIANLRNNCWKEKQQRKACCTGHATLATQICTTEHRRWAPPAAADCQRCRPPCMDSPGPATPPRSKL

SEQ ID NO: 2003 - protein, 636 aa, Homo sapiens
MNFVKLLHAYNRTHLLACGTGAFHPTCAFVEVGHRAEEPVLRLDPGRIEDGKGKSPYDPRHRAASVLVGEELYSGVAADLMGRDFTIFRSLGQRPSLRTEPHDSRWLNEPKFVKVFWIPESENPDDDKIYFFFRETAVEAAPALGRLSVSRVGQICRNDVGGQRSLVNKWTTFLKARLVCSVPGVEGDTHFDQLQDVFLLSSRDHRTPLLYAVFSTSSSIFQGSAVCVYSMNDVRRAFLGPFAHKEGPMHQWVSYQGRVPYPRPGMCPSKTFGTFSSTKDFPDDVIQFARNHPLMYNSVLPTGGRPLFLQVGANYTFTQIAADRVAAADGHYDVLFIGTDVGTVLKVISVPKGSRPSAEGLLLEELHVFEDSAAVTSMQISSKRHQLYVASRSAVAQIALHRCAAHGRVCTECCLARDPYCAWDGVACTRFQPSAKRRFRRQDVRNGDPSTLCSGDSSRPALLEHKVFGVEGSSAFLECEPRSLQARVEWTFQRAGVTAHTQVLAEERTERTARGLLLRRLRRRDSGVYLCAAVEQGFTQPLRRLSLHVLSATQAERLARAEEAAPAAPPGPKLWYRDFLQLVEPGGGGSANSLRMCRPQPALQSLPLESRRKGRNRRTHAPEPRAERGPRSATHW

SEQ ID NO: 2004 - protein, 296 aa, Homo sapiens [sequence omitted]

SEQ ID NO: 2005 - protein, 253 aa, Homo sapiens
METRPMTLEEMEEVGKRYRERQRQHKLTIPSIQYTEQCHLVRCGNRHFDEHCLPSTIHGDMRELIDSARRHNFLVYLQCWKLCKSYGLPLTEDILMKALLYPGDKIIFQMDKVCPIRQPGGYYSDWKVFSPNLALLRSQGPGKSKRTDKKTPKKSKKMRFKEFEEFTRKLKVKRSSGLQQTHPNSFWPGHLLDKLQLYLPTVATDRSLALFSCVQHQPHVYPATYHPDHWWPLRNKNYMTHAHYDAAKVYYIN

SEQ ID NO: 2006 - protein, 856 aa, Homo sapiens [sequence omitted]

SEQ ID NO: 2007 - protein, 586 aa, Homo sapiens
MESNHKSGDGLSGTQKEAALRALVQRTGYSLVQENGQRKYGGPPPGWDAAPPERGCEIFIGKLPRDLFEDELIPLCEKIGKIYEMRMMMDFNGNNRGYAFVTFSNKVEAKNAIKQLNNYEIRNGRLLGVCASVDNCRLFVGGIPKTKKREEILSEMKKVTEGVVDVIVYPSAADKTKNRGFAFVEYESHRAAAMARRKLLPGRIQLWGHGIAVDWAEPEVEVDEDTMSSVKILYVRNLMLSTSEEMIEKEFNNIKPGAVERVKKIRDYAFVHFSNREDAVEAMKALNGKVLDGSPIEVTLAKPVDKDSYVRYTRGTGGRGTMLQGEYTYSLGQVYDPTTTYLGAPVFYAPQTYAAIPSLHFPATKGHLSNRAIIRAPSVRGAAGVRGLGGRGYLAYTGLGRGYQVKGDKREDKLYDILPGMELTPMNPVTLKPQGIKLAPQILEEICQKNNWGQPVYQLHSAIGQDQRQLFLYKITIPALASQNPAIHPFTPPKLSAFVDEAKTYAAEYTLQTLGIPTDGGDGTMATAAAAATAFPGYAVPNATAPVSAAQLKQAVTLGQDLAAYTTYEVYPTFAVTARGDGYGTF

SEQ ID NO: 2008 - protein, 240 aa, Homo sapiens
MAMATKGGTVKAASGFNAMEDAQTLRKAMKGLGTDEDAIISVLAYRNTAQRQEIRTAYKSTIGRDLIDDLKSELSGNFEQVIVGMMTPTVLYDVQELRRAMKGAGTDEGCLIEILASRTPEEIRRISQTYQQQYGRSLEDDIRSDTSFMFQRVLVSLSAGGRDEGNYLDDALVRQDAQDLYEAGEKKWGTDEVKFLTVLCSRNRNHLLHGLMNTKGYHRRILNRVLNLKHLVALKMLCWL

SEQ ID NO: 2009 - protein, 158 aa, Homo sapiens
MAARSVSGITRRVFMWTVSGTPCREFWSRFRKEKEPVVVETVEEKKEPILVCPPLRSRAYTPPEDLQSRLESYVKEVFGSSLPSNWQDISLEDSRLKFNLLAHLADDLGHVVPNSRLHQMCRVRDVLDFYNVPIQDRSKFDELSASNLPPNLKITWSY

SEQ ID NO: 2010 - protein, 400 aa, Homo sapiens
MSPPRLGAWTHARRCPAPTQPVPFMRGLETCRNGPSPKMGLNIKSFFHPRWGENLKVLSTRRMTTTFLLLVSQGAQPHSGDIGIPFPRGARPTGGGFSGCTGPEEAGEEEAPEAEKEPRVGGGRRRRQAVLLHVQGLPVPALEGERLFQNAEPAPAEGDEGLPDRQQARGALPREAGGRAEQGTAAVPAAEPRARADAGRHRGALFCAGLAAPGARRAPEPAAPPRPAHCAVVMSAGAILNSSLGEEIDSHDAVLRFNSAPTRGYEKDVGNKTTIRIINSQILTNPSHHFIDSSLYKDVILVAWDPAPYSANLNLWYKKPDYNLFTPYIQHRQRNPNQPFYILHPKFIWQLWDIIQENTKEKIQPNPPSSGFIGSFVKIGHIRACSEPRSRDCTPAWTTE

SEQ ID NO: 2011 - protein, 153 aa, Homo sapiens
MECQLHKSRGQVGLCPNFPEPTVPKWDSRVGGLCDFCSPTSFSTRPPMVPPWLWEAGIRERGSMPVSRTLPTLAWWQTWLPRAELPVPLTPQRSGHFLHVSPAHVNCRQNQGSLRAAWGRHQTPGVPSWDPTHPTLKPGWGLEQGVWFLGAGS

SEQ ID NO: 2012 - protein, 361 aa, Homo sapiens
MWVLTPAAFAGKLLSVFRQPLSSLWRSLVPLFCWLRATFWLLATKRRKQQLVLRGPDETKEEEEDPPLPTTPTSVNYHFTRQCNYKCGFCFHTAKTSFVLPLEEAKRGLLLLKEAGMEKINFSGGEPFLQDRGEYLGKLVRFCKVELRLPSVSIVSNGSLIRERWFQNYGEYLDILAISCDSFDEEVNVLIGRGQGKKNHVENLQKLRRWCRDYRVAFKINSVINRFNVEEDMTEQIKALNPVRWKVFQCLLIEGENCGEDALREAERFVIGDEEFERFLERHKEVSCLVPESNQKMKDSYLILDEYMRFLNCRKGRKDPSKSILDVGVEEAIKFSGFDEKMFLKRGGKYIWSKADLKLDW

SEQ ID NO: 2013 - protein, 371 aa, Homo sapiens
MLQCYRCRQWFHEACTQCLNEPMMFGDRFYLFFCSVCNQGPEYIERLPLRWVDVVHLALYNLGVQSKKKYFDFEEILAFVNHHWELLQLGKLTSTPVTDRGPHLLNALNSYKSRFLCGKEIKKKKCIFRLRIRVPPNPPGKLLPDKGLLPNENSASSELRKRGKSKPGLLPHEFQQQKRRVYRRKRSKFLLEDAIPSSDFTSAWSTNHHLASIFDFTLDEIQSLKSASSGQTFFSDVDSTDAASTSGSASTSLSYDSRWTVGSRKRKLAAKAYMPLRAKRWAAELDGRCPSDSSAEGASVPERPDEGIDSHTFESISEDDSSLSHLKSSITNYFGAAGRLACGEKYQVLARRVTPEGKVQYLVEWEGTTPY

SEQ ID NO: 2014 - protein, 370 aa, Homo sapiens
MPTETLQTGSMVKPVSPAGTFTSAVPLRILNKGPDYFRRQAEPNPKRLTAVERLEADKAKYVKSQEVINAKQEPVKPAVLAKPPVCPAAKRALGSPTLKVFGNHAKTESGVQRENLKLEILKNIINSSEGSSSGSGHKHSSRNWPPHRSEATDLHRHSFAESLKVYPTQGRRSPQEGGSHVGRRLLEQSAESFLHVSHSSSDIRKVTSVKPLKAIPCSSSAPPLPPKPKIAAIASMKSPEADPVEPACGVSRRPSLQRSKSDLSDRYFRVDADVERFFNYCGLDPEELENLGMENFARANSDIISLNFRSASMISSDCEQSQDSNSDLRNDDSANDRVPYGISAIERNARIIKWLYSIKQARESQKVSHV

SEQ ID NO: 2015 - protein, 523 aa, Homo sapiens
MTVVPGDHLLEPEVADGGGAPPQGGCGGGGCDRYEPLPPSLPAAGEQDCCGERVVINISGLRFETQLKTLCQFPETLLGDPKRRMRYFDPLRNEYFFDRNRPSFDAILYYYQSGGRIRRPVNVPIDIFSEEIRFYQLGEEAMEKFREDEGFLREEERPLPRRDFQRQVWLLFEYPESSGPARGIAIVSVLVILISIVIFCLETLPEFRDEKDYPASTSQDSFEAAGNSTSGSRAGASSFSDPFFVVETLCIIWFSFELLVRFFACPSKATFSRNIMNLIDIVAIIPYFITLGTELAERQGNGQQAMSLAILRVIRLVRVFRIFKLSRHSKGLQILGQTLKASMRELGLLIFFLFIGVILFSSAVYFAEADDPTSGFSSIPDAFWWAVVTMTTVGYGDMHPVTIGGKIVGSLCAIAGVLTIALPVPVIVSNFNYFYHRETEGEEQSQYMHVGSCQHLSSSAEELRKARSNSTLSKSEYMVIEEGGMNHSAFPQTPFKTGNSTATCTTNNNPNSCVNIKKIFTDV

SEQ ID NO: 2016 - protein, 588 aa, Homo sapiens
MVELPLRHPALFKAIGVKPPRGILLYGPPGTGKTLIARAVANETGAFFFLINGPEIMSKLAGESESNLRKAFEEAEKNAPAIIFIDELDAIAPKREKTHGEVERRIVSQLLTLMDGLKQRAHVIVMAATNRPNSIDPALRRFGRFDREVDIGIPDATGRLEILQIHTKNMKLADDVDLEQVANETHGHVGADLAALCSEAALQAIRKKMDLIDLEDETIDAEVMNSLAVTMDDFRWALSQSNPSALRETVVEVPQVTWEDIGGLEDVKRELQELVQYPVEHPDKFLKFGMTPSKGVLFYGPPGCGKTLLAKAIANECQANFISIKGPELLTMWFGESEANVREIFDKARQAAPCVLFFDELDSIAKARGGNIGDGGGAADRVINQILTEMDGMSTKKNVFIIGATNRPDIIDPAILRPGRLDQLIYIPLPDEKSRVAILKANLRKSPVAKDVDLEFLAKMTNGFSGADLTEICQRACKLAIRESIESEIRRERERQTNPSAMEVEEDDPVPEIRRDHFEEAMRFARRSVSDNDIRKYEMFAQTLQQSRGFGSFRFPSGNQGGAGPSQGSGGGTGGSVYTEDNDDDLYG

SEQ ID NO: 2017 - protein, 186 aa, Homo sapiens [sequence omitted]

SEQ ID NO: 2018 - protein, 913 aa, Homo sapiens
MTIKKPPQLSEDDIWLKSEGDNYSATLLEPAASSLSPDHKNMEIEVSVAECKSVPGITSTPHPMDHPSAFYSPPHNGLLTDHHESLDNDVAREIRYLDEVLEANCCDSAVDGTYNGTSSPEPGAVVLVGGLSPPVHEATQPEPTERTASRQAPPHIELSNSSPDPMAEAERTNGHSPSQPRDALGDSLQVPVSPSSTTSSRCSSRDGEFTLTTLKKEAKFELRAFHEDKKPSKLFEDDEHEKEQYCIRKVRPSEEMLELEKERRELIRSQAVKKNPGIAAKWWNPPQEKTIEEQLDEEHLESHKKYKERKERRAQQEQLLLQKQLQQQQQQPPSQLCTAPASSHERASMIDKAKEDIVTEQIDFSAARKQFQLMENSRQAVAKGQSTPRLFSIKPFYRPLGSVNSDKPLTNPRPPSVGGPPEDSGASAAKGQKSPGALETPSAAGSQGNTASQGKEGPYSEPSKRGPLSKLWAEDGEFTSARAVLTVVKDDDHGILDQFSRSVNVSLTQEELDSGLDELSVRSQDTTVLETLSNDFSMDNISDSGASNETTNALQENSLADFSLPQTPQTDNPSEGRGEGVSKSFSDHGFYSPSSTLGDSPLVDDPLEYQAGLLVQNAIQQAIAEQVDKAVSKTSRDGAEQQGPEATVEEAEAAAFGSEKPQSMFEPPQVSSPVQEKRDVLPKILPAEDRALRERGPPQPLPAVQPSGPINMEETRPEGSYFSKYSEAAELRSTASLLATQESDVMVGPFKLRSRKQRTLSMIEEEIRAAQEREEELKRQRQVLQSTQSPRTKNAPSLPSRTCYKTAPGKIEKVKPPPSPTTEGPSLQPDLAPEEAAGTQRPKNLMQTLMEDYETHKSKRRERMDDSSYTSKLLSCKVTSEVLEATRVNRRKSALALRWEAGIYANQEEEDNE

SEQ ID NO: 2019 - protein, 105 aa, Homo sapiens
MVKQIESKTAFQEALDAAGDKLVVVDFSATWCGPCKMIKPFFHSLSEKYSNVIFLEVDVDDCQDVASECEVKCMPTFQFFKKGQKVGEFSGANKEKLEATINELV

SEQ ID NO: 2020 - protein, 1199 aa, Homo sapiens
MPLTGVEPARMNRKKGDKGFESPRPYKLTHQVVCINNINFQRKSVVGFVELTIFPTVANLNRIKLNSKQCRIYRVRINDLEAAFIYNDPTLEVCHSESKQRNLNYFSNAYAAAVSAVDPDAGNGELCIKVPSELWKHVDELKVLKIHINFSLDQPKGGLHFVVPSVEGSMAERGAHVFSCGYQNSTRFWFPCVDSYSELCTWKLEFTVDAAMVAVSNGDLVETVYTHDMRKKTFHYMLTIPTAASNISLAIGPFEILVDPYMHEVTHFCLPQLLPLLKHTTSYLHEVFEFYEEILTCRYPYSCFKTVFIDEAYVEVAAYASMSIFSTNLLHSAMIIDETPLTRRCLAQSLAQQFFGCFISRMSWSDEWVLKGISGYIYGLWMKKTFGVNEYRHWIKEELDKIVAYELKTGGVLLHPIFGGGKEKDNPASHLHFSIKHPHTLSWEYYSMFQCKAHLVMRLIENRISMEFMLQVFNKLLSLASTASSQKFQSHMWSQMLVSTSGFLKSISNVSGKDIQPLIKQWVDQSGVVKFYGSFAFNRKRNVLELEIKQDYTSPGTQKYVGPLKVTVQELDGSFNHTLQIEENSLKHDIPCHSKSRRNKKKKIPLMNGEEVDMDLSAMDADSPLLWIRIDPDMSVLRKVEFEQADFMWQYQLRYERDVVAQQESILALEKFPTPASRLALTDILEQEQCFYRVRMSACFCLAKIANSMVSTWTGPPAMKSLFTRMFCCKSCPNIVKTNNFMSFQSYFLQKTMPVAMALLRDVHNLCPKEVLTFILDLIKYNDNRKNKFSDNYYRAEMIDALANSVTPAVSVNNEVRTLDNLNPDVRLILEEITRFLNMEKLLPSYRHTITVSCLRAIRVLQKNGHVPSDPALFKSYAEYGHFVDIRIAALEAVVDYTKVDRSYEELQWLLNMIQNDPVPYVRHKILNMLTKNPPFTKNMESPLCNEALVDQLWKLMNSGTSHDWRLRCGAVDLYFTLFGLSRPSCLPLPELGLVLNLKEKKAVLNPTIIPESVAGNQEAANNPSSHPQLVGFQNPFSSSQDEEEIDMDTVHDSQAFISHHLNMLERPSTPGLSKYRPASSRSALIPQHSAGCDSTPTTKPQWSLELARKGTGKEQAPLEMSMHPAASAPLSVFTKESTASKHSDHHHHHHHEHKKKKKKHKHKHKHKHKHDSKEKDKEPFTFSSPASGRSIRSPSLSD

SEQ ID NO: 2021 - protein, 510 aa, Homo sapiens
MYRALRLLARSRPLVRAPAAALASAPGLGGAAVPSFWPPNAARMASQNSFRIEYDTFGELKVPNDKYYGAQTVRSTMNFKIGGVTERMPTPVIKAFGILKRAAAEVNQDYGLDPKIANAIMKAADEVAEGKLNDHFPLVVWQTGSGTQTNMNVNEVISNRAIEMLGGELGSKIPVHPNDHVNKSQSSNDTFPTAMHIAAAIEVHEVLLPGLQKLHDALDAKSKEFAQIIKIGRTHTQDAVPLTLGQEFSGYVQQVKYAMTRIKAAMPRIYELAAGGTAVGTGLNTRIGFAEKVAAKVAALTGLPFVTAPNKFEALAAHDALVELSGAMNTTACSLMKIANDIRFLGSGPRSGLGELILPENEPGSSIMPGKVNPTQCEAMTMVAAQVMGNHVAVTVGGSNGHFELNVFKPMMIKNVLHSARLLGDASVSFTENCVVGIQANTERINKLMNESLMLVTALNPHIGYDKAAKIAKTAHKNGSTLKETAIELGYLTAEQFDEWVKPKDMLGPK

SEQ ID NO: 2022 - protein, 206 aa, Homo sapiens
MAANKPKGQNSLALHKVIMVGSGGVGKSALTLQFMYDEFVEDYEPTKADSYRKKVVLDGEEVQIDILDTAGQEDYAAIRDNYFRSGEGFLCVFSITEMESFAATADFREQILRVKEDENVPFLLVGNKSDLEDKRQVSVEEAKNRAEQWNVNYVETSAKTRANVDKVFFDLMREIRARKMEDSKEKNGKKKRKSLAKRIRERCCIL

SEQ ID NO: 2023 - protein, 731 aa, Homo sapiens
MSDTFTDNWTDGSHYDNTGFVAEETTAENANSNPLLSSKSRSTSSHGRRPLIRQDRIVGVPLELEQSTHRHTPETEVPPSNPWQNWTRTPSPFEDRTAFPSKLETTPTTSPLPERKEHIKESTEIPSPFSPGVPWEYHDSNPNRSLSNVFSQIHCRPESSKGVISISKSTERLSPLMKDIKSNKFKKSQSIDEIDIGTYKVYNIPLENYASGSDHLGSHERPDKMLGPEHGMSSMSRSQSVPMLDDEMLTYGSSKGPQQQKASMTKKVYQFDQSFNPQGSVEVKAEKRIPPPFQHNPEYVQQASKNIAKDLISPRAYRGYPPMEQMFSFSQPSVNEDAVVNAQFASQGARAGFLRRADSLVSATEMAMFRRVNEPHELPPTDRYGRPPYRGGLDRQSSVTVTESQFLKRNGRYEDEHPSYQEVKAQAGSFPVKNLTQRRPLSARSYSTESYGASQTRPVSARPTMAALLEKIPSDYNLGNYGDKPSDNSDLKTRPTPVKGEESCGKMPADWRQQLLRHIEARRLDRTPSQQSNILDNGQEDVSPSGQWNPYPLGRRDVPPDTITKKAGSHIQTLMGSQSLQHRSREQQPYEGNINKVTIQQFQSPLPIQIPSSQATRGPQPGRCLIQTKGQRSMDGYPEQFCVRIEKNPGLGFSISGGISGQGNPFKPSDKGIFVTRVQPDGPASNLLQPGDKILQANGHSFVHMEHEKAVLLLKSFQNTVDLVIQRELTV

SEQ ID NO: 2024 - protein, 137 aa, Homo sapiens
MIVVKVGIISGGNCVCHTFRKVIKERNTLNVMNVGKLSGRSHISLDIRGCTQDRNPFNVMNVKKLSGISQTSLNIKDHTQGRNLLNAMNVGKPLAISQPSHYTREHIQGRNPINVMRVGKLFARNLTSLNIREHTQG

SEQ ID NO: 2025 - protein, 149 aa, Homo sapiens
MMIIPHLLRDKDQRSTTATSPRTRQCWGMENEGVQLWPSQSSGGDETHLPLSLWARLMPGASVDRGHAPGLPKLEKAARLRSEGQNSTVSPTESRWEQGRWLPRLCGRIRFLAVEVACTPQLVLPVSNDWSFLLLSLHLPPSPSPALLL

SEQ ID NO: 2026 - protein, 465 aa, Homo sapiens
MRRPRGEPGPRAPRPTEGATCAGPGESWSPSPNSMLRVLLSAQTSPARLSGLLLIPPVQPCCLGPSKWGDRPVGGGPSAGPVQGLQRLLEQAKSPGELLRWLGQNPSKVRAHHYSVALRRLGQLLGSRPRPPPVEQVTLQDLSQLIIRNCPSFDIHTIHVCLHLAVLLGFPSDGPLVCALEQERRLRLPPKPPPPLQPLLRGGQGLEAALSCPRFLRYPRQHLISSLAEARPEELTPHVMVLLAQHLARHRLREPQLLEAIAHFLVVQETQLSSKVVQKLVLPFGRLNYLPLEQQFMPCLERILAREAGVAPLATVNILMSLCQLRCLPFRALHFVFSPGFINYISGTPHALIVRRYLSLLDTAVELELPGYRGPRLPRRQQVPIFPQPLITDRARCKYSHKDIVAEGLRQLLGEEKYRQDLTVPPGYCTDFLLCASSSGAVLPVRTQDPFLPYPPRSCPSSRAT

SEQ ID NO: 2027 - protein, 881 aa, Homo sapiens
MTKSMERGRPPENRKMFQRAQELRRRAEDYHKCKIPPSARKALCNWVRMAAAEHRHSSGLPYWPYLTAETLKNRMGHQPPPPTQQHSITDNSLSLKTPPECLLTPLPPSADDNLKTPPECVLTPLPPSADDNLKTPPECVLTPLPPSADDNLKTPPECLLTPLPPSADDNLKTPPECLLTPLPPSALPSAPPSADDNLKTRAECLLHPLPPSADDNLKTPSERQLTPLPPSAPPSADDNIKTPAERLRGPLPPSADDNLKTPSERQLTALPPSADDNIKTPAERLRGPLPPSADDNLKTPSERQLTPLPPSAPPSADDNIKTPAERLRGPLPPSADDNLKTPSERQLTPLPPSAPPSADDNIKTPAFHPQRMISRHLPSVSSLPFHPQLHPQQMIISRYLLSVCGFRFHHQPMIISRHLPSVSSLPFHPQLHPQQMIISRHLPSVCGGRFHPQQMIISRHLPSVSSLPFHPQLHPQQMMISRHLPSVCGGRFHPQRMIISRHLPSVSSLPFHPQLHPQQMIISRHLPSVCGGRFHPQQMIISRHLPSVSSLPFHPQLHPQQMIISRHLPSVCGGRFHPQRMIISRHLPSVSSLPFHPQLHPQQMIISRHLPSVCGERLRGPLPPSADDNLKTLSERQLTPLPPSAPPSADDNIKTPAERLRGPLPPSADDNLKTPSERQLTPLPPSAPPSADDNIKTPAERLRGPLPPSADDNLKTPSERQLTPLPPSAPPSADDNIKTPAERLRGPLPPSADDNLKTPPLATQEAEAEKPRKPKRQRAAEMEPPPEPKRRRVGDVEPSRKPKRRRAADVEPSSPEPKRRRVGDVEPSRKPKRRRAADVEPSSPEPKRRRVGDVEPSRKPKRRRAADVEPSLPEPKRRRLS

SEQ ID NO: 2028 - protein, 116 aa, Homo sapiens
MEPAAGSSMEPSADWLATAAARGRVEEVRALLEAGALPNAPNSYGRRPIQVGRGSAAGAGDGGRLWRTKFAGELESGSASILRKKGRLPGEFSEGVCNHRPPPGDALGAWEAKEEE

SEQ ID NO: 2029 - protein, 1320 aa, Homo sapiens
MMNRTTPDQELAPASEPVWERPWSVEEIRRSSQSWSLAADAGLLQFLQEFSQQTISRTHEIKKQVDGLIRETKATDCRLHNVFNDFLMLSNTQFIENRVYDEEVEEPVLKAEAEKTEQEKTREQKEVDLIPKVQEAVNYGLQVLDSAFEQLDIKAGNSDSEEDDANGRVELILEPKDLYIDRPLPYLIGSKLFMEQEDVGLGELSSEEGSVGSDRGSIVDTEEEKEEEESDEDFAHHSDNEQNQHTTQMSDEEEDDDGCDLFADSEKEEEDIEDIEENTRPKRSRPTSFADELAARIKGDAVGRVDEEPTTLPSGEAKPRKTLKEKKERRTPSDDEEDNLFAPPKLTDEDFSPFGSGGGLFSGGKGLFDDEDEESDLFTEAPQDRQAGASVKEESSSSKPGKKIPAGAVSVFLGDTDVFGAASVPSMKEPQKPEQPTPRKSPYGPPPTGLFDDDDGDDDDDFFSAPHSKPSKTGKVQSTADIFGDEEGDLFKEKAVASPEATVSQTDENKARAEKKVTLSSSKNLKPSSETKTQKGLFSDEEDSEDLFSSQSASKLKGASLLPGKLPTLVSLFDDEDEEDNLFGGTAAKKQTLCLQAQREEKAKASELSKKKASALLFSSDEEDQWNIPASQTHLASDSRSKGEPRDSGTLQSQEAKAVKKTSLFEEDEEDDLFAIAKDSQKKTQRVSLLFEDDVDSGGSLFGSPPTSVPPATKKKETVSEAPPLLFSDEEEKEAQLGVKSVDKKVESAKESLKFGRTDVAESEKEGLLTRSAQETVKHSDLFSSSSPWDKGTKPRTKTVLSLFDEEEDKMEDQNIIQAPQKEVGKGRDPDAHPKSTGVFQDEELLFSHKLQKDNDPDVDLFAGTKKTKLLEPSVGSLFGDDEDDDLFSSAKSQPLVQEKKRVVKKDHSVDSFKNQKHPESIQGSKEKGIWKPETPQANLAINPAALLPTAASQISEVKPVLPELAFPSSEHRRSHGLESVPVLPGSGEAGVSFDLPAQADTLHSANKSRVKMRGKRRPQTRAARRLAAQESSETEDMSVPRGPIAQWADGAISPNGHRPQLRAASGEDSTEEALAAAAAPWEGGPVPGVDRSPFAKSLGHSRGEADLFDSGDIFSTGTGSQSVERTKPKAKIAENPANPPVGGKAKSPMFPALGEASSDDDLFQSAKPKPAKKTNPFPLLEDEDDLFTDQKVKKNETKSNSQQDVILTTQDIFEDDIFATEAIKPSQKTREKEKTLESNLFDDNIDIFADLTVKPKEKSKKKVEAKSIFDDDMDDIFSSGIQAKTTKPKSRSAQAAPEPRFEHKVSNIFDDPLNAFGGQ

SEQ ID NO: 2030 - protein, 147 aa, Homo sapiens
MGFIFSKSMNESMKNQKEFMLMNARLQLERQLIMQSEMRERQMAMQIAWSREFLKYFGTFFGLAAISLTAGAIKKKKPAFLVPIVPLSFILTYQYDLGYGTLLERMKGEAEDILETEKSKLQLPRGMITFESIEKARKEQSRFFIDK

SEQ ID NO: 2031 - protein, 925 aa, Homo sapiens
MTTEQRRSLQAFQDYIRKTLDPTYILSYMAPWFREEEVQYIQAEKNNKGPMEAATLFLKFLLELQEEGWFRGFLDALDHAGYSGLYEAIESWDFKKIEKLEEYRLLLKRLQPEFKTRIIPTDIISDLSECLINQECEEILQICSTKGMMAGAEKLVECLLRSDKENWPKTLKLALEKERNKFSELWIVEKGIKDVETEDLEDKMETSDIQIFYQEDPECQNLSENSCPPSEVSDTNLYSPFKPRNYQLELALPAMKGKNTIICAPTGCGKTFVSLLICEHHLKKFPQGQKGKVVFFANQIPVYEQQKSVFSKYFERHGYRVTGISGATAENVPVEQIVENNDIIILTPQILVNNLKKGTIPSLSIFTLMIFDECHNTSKQHPYNMIMFNYLDQKLGGSSGPLPQVIGLTASVGVGDAKNTDEALDYICKLCASLDASVIATVKHNLEELEQVVYKPQKFFRKVESRISDKFKYIIAQLMRDTESLAKRICKDLENLSQIQNREFGTQKYEQWIVTVQKACMVFQMPDKDEESRICKALFLYTSHLRKYNDALIISEHARMKDALDYLKDFFSNVRAAGFDEIEQDLTQRFEEKLQELESVSRDPSNENPKLEDLCFILQEEYHLNPETITILFVKTRALVDALKNWIEGNPKLSFLKPGILTGRGKTNQNTGMTLPAQKCILDAFKASGDHNILIATSVADEGIDIAQCNLVILYEYVGNVIKMIQTRGRGRARGSKCFLLTSNAGVIEKEQINMYKEKMMNDSILRLQTWDEAVFREKILHIQTHEKFIRDSQEKPKPVPDKENKKLLCRKCKALACYTADVRVIEECHYTVLGDAFKECFVSRPHPKPKQFSSFEKRAKIFCARQNCSHDWGIHVKYKTFEIPVIKIESFVVEDIATGVQTLYSKWKDFHFEKIPFDPAEMSK

SEQ ID NO: 2032 - protein, 102 aa, Homo sapiens [sequence omitted]

SEQ ID NO: 2033 - protein, 999 aa, Homo sapiens
MVCSPVTVRIAPPDRRFSRSAIPEQIISSTLSSPSSNAPDPCAKETVLSALKEKEKKRTVEEEDQIFLDGQENKRRRHDSSGSGHSAFEPLVANGVPASFVPKPGSLKRGLNSQSSDDHLNKRSRSSSMSSLTGAYASGIPSSSRNAITSSYSSTRGISQLWKRNGPSSSPFSSPASSRSQTPERPAKKIREEELCHHSSSSTPLAADRESQGEKAADTTPRKKQNSNSQSTPGSSGQRKRKVQLLPSRRGEQLTLPPPPQLGYSITAEDLDLEKKASLQWFNQALEDKSDAASNSVTETPPITQPSFTFTLPAAAPASPPTSLLAPSTNPLLESLKKMQTPPSLPPCPESAGAATTEALSPPKTPSLLPPLGLSQSGPPGLLPSPSFDSKPPTTLLGLIPAPSMVPATDTKAPPTLQAETATKPQATSAPSPAPKQSFLFGTQNTSPSSPAAPAASSAPPMFKPIFTAPPKSEKEGPTPPGPSVTATAPSSSSLPTTTSTTAPTFQPVFSSMGPPASVPLPAPFFKQTTTPATAPTTTAPLFTGLASATSAVAPITSASPSTDSASKPAFGFGINSVSSSSVSTTTSTATAASQPFLFGAPQASAASFTPAMGSIFQFGKPPALPTTTTVTTFSQSLHTAVPTATSSSAADFSGFGSTLATSAPATSSQPTLTFSNTSTPTFNIPFGSSAKSPLPSYPGANPQPAFGAAEGQPPGAAKPALAPSFGSSFTFGNSAAPAAAPTPAPPSMIKVVPAYVPTPIHPIFGGATHSAFGLKATASAFGAPASSQPAFGGSTAVFFGAATSSGFGATTQTASSGSSSSVFGSTTPSPFTFGGSAAPAGSGSFGINVATPGSSTTTGAFSFGAGQSGSTATSTPFAGGLGQNALGTTGQSTPFAFNVSSTTESKPVFGGTATPTFGLNTPAPGVGTSGSSLSFGASSAPAQGFVGVAPFGNTFAHQQEHSPRKGPNNLSKRKLLPAVRAQGLPRRGQASSFPTRKE

SEQ ID NO: 2034 - protein, 466 aa, Homo sapiens
MSTRSVSSSSYRRMFGGPGTASRPSSSRSYVTTSTRTYSLGSALRPSTSRSLYASSPGGVYATRSSAVRLRSSVPGVRLLQDSVDFSLADAINTEFKNTRTNEKVELQELNDRFANYIDKVRFLEQQNKILLAELEQLKGQGKSRLGDLYEEEMRELRRQVDQLTNDKARVEVERDNLAEDIMRLREKLQEEMLQREEAENTLQSFRQDVDNASLARLDLERKVESLQEEIAFLKKLHEEEIQELQAQIQEQHVQIDVDVSKPDLTAALRDVRQQYESVAAKNLQEAEEWYKSKFADLSEAANRNNDALRQAKQESTEYRRQVQSLTCEVDALKGTNESLERQMREMEENFAVEAANYQDTIGRLQDEIQNMKEEMARHLREYQDLLNVKMALDIEIATYRKLLEGEESRISLPLPNFSSLNLRETNLDSLPLVDTHSKRTLLIKTVETRDGQVINETSQHHDDLE

SEQ ID NO: 2035 - protein, 489 aa, Homo sapiens
MESMFSSPAEAALQRETGVPGLLTPLPDLDGVYELERVAGFVRDLGCERVALQFPDQLLGDAVAVAARLEETTGSKMFILGDTAYGSCCVDVLGAEQAGAQALIHFGPACLSPPARPLPVAFVLRQRSVALELCVKAFEAQNPDPKAPVVLLSEPACAHALEALATLLRPRYLDLLVSSPAFPQPVGSLSPEPMPLERFGRRFPLAPGRRLEEYGAFYVGGSKASPDPDLDPDLSRLLLGWAPGQPFSSCCPDTGKTQDEGARAGRLRARRRYLVERARDARVVGLLAGTLGVAQHREALAHLRNLTQAAGKRSYVLALGRPTPAKLANFPEVDVFVLLACPLGALAPQLSGSFFQPILAPCELEAACNPAWPPPGLAPHLTHYADLLPGSPFHVALPPPESELWETPDVSLITGDLRPPPAWKSSNDHGSLALTPRPQLELAESSPAASFLSSRSWQGLEPRLGQTPVTEAVSGRRGIAIAYEDEGSG

SEQ ID NO: 2036 - protein, 946 aa, Homo sapiens
MKRLTCFFICFFLSEVSGFEIPINGLSEFVDYEDLVELAPGKFQLVAENRRYQRSLPGESEEMMEEVDQVTLYSYKVQSTITSRMATTMIQSKVVNNSPQPQNVVFDVQIPKGAFISNFSMTVDGKTFRSSIKEKTVGRALYAQARAKGKTAGLVRSSALDMENFRTEVNVLPGAKVQFELHYQEVKWRKLGSYEHRIYLQPGRLAKHLEVDVWVIEPQGLRFLHVPDTFEGHFDGVPVISKGQQKAHVSFKPTVAQQRICPNCRETAVDGELVVLYDVKREEKAGELEVFNGYFVHFFAPDNLDPIPKNILFVIDVSGSMWGVKMKQTVEAMKTILDDLRAEDHFSVIDFNQNIRTWRNDLISATKTQVADAKRYIEKIQPSGGTNINEALLRAIFILNEANNLGLLDPNSVSLIILVSDGDPTVGELKLSKIQKNVKENIQDNISLFSLGMGFDVDYDFLKRLSNENHGIAQRIYGNQDTSSQLKKFYNQVSTPLLRNVQFNYPHTSVTDVTQNNFHNYFGGSEIVVAGKFDPAKLDQIESVITATSANTQLVLETLAQMDDLQDFLSKDKHADPDFTRKLWAYLTINQLLAERSLAPTAAAKRRITRSILQMSLDHHIVTPLTSLVIENEAGDERMLADAPPQDPSCCSGALYYGSKVVPDSTPSWANPSPTPVISMLAQGSQVLESTPPPHVMRVENDPHFIIYLPKSQKNICFNIDSEPGKILNLVSDPESGIVVNGQLVGAKKPNNGKLSTYFGKLGFYFQSEDIKIEISTETITLSHGSSTFSLSWSDTAQVTNQRVQISVKKEKVVTITLDKEMSFSVLLHRVWKKHPVNVDFLGIYIPPTNKFSPKAHGLIGQFMQEPKIHIFNERPGKDPEKPEASMEVKGQKLIITRGLQKDYRTDLVFGTDVTCWFVHNSGKGFIDGHYKDYFVPQLYSFLKRP

SEQ ID NO: 2037 - protein, 247 aa, Homo sapiens
MLVLRSGLTKALASRTLAPQVCSSFATGPRQYDGTFYEFRTYYLKPSNMNAFMENLKKNIHLRTSYSELVGFWSVEFGGRTNKVFHIWKYDNFAHRAEVRKALANCKEWQEQSIIPNLARIDKQETEITYLIPWSKLEKPPKEGVYELAVFQMKPGGPALWGDAFERAINAHVNLGYTKVVGVFHTEYGELNRVHVLWWNESADSRAAGRHKSHEDPRVVAAVRESVNYLVSQQNMLLIPASFSPLK

SEQ ID NO: 2038 - protein, 1621 aa, Homo sapiens
MEWVLAEALLSQSRDPRALLGALCQGEASAERVETLRFLLQRLEDEEARGSGGAGALPEAAREVAAGYLVPLLRSLRGRPAGGPDPSMQPPHRRRVLRANSSALRSCVRLAGRPQLAAALAEEALRDLLAGWRAPGAEAAVEVLAAVGPCLRPREDGPLLERVAGTAVALALGGGGDGDEAGPAEDAAALVAGRLLPVLVQCGGAALRAVWGGLAAPGASLGSGRVEEKLLVLSALAEKLLPEPGGDRARGAREAGPDARRCWRFWRTVQAGLGQADALTRKRARYLLQRAVEVSAELGADCTCGPQEGNGPSLFWWSERKKDELLKFWENYILIMETLEGNQIHVIKPVLPKLNNLFEYAVSEENGCWLFHPSWHMCIYKRMFESENKILSKEGVIHFLELYETKILPFSPEFSEFIIGPLMDALSESSLYSRSPGQPIGSCSPLGLKLQKFLVTYISLLPEEIKSSFLLKFIRKMTSRHWCAVPILFLSKALANVPRHKALGIDGLLALRDVIHCTMITHQILLRGAAQCYLLQTAMNLLDVEKVSLSDVSTFLMSLRQEESLGRGTSLWTELCDWLRVNESYFKPSPTCSSIGLHKTSLNAYVKSIVQEYVKSSAWETGENCFMPDWFEAKLVSLMVLLAVDVEGMKTQYSGKQRTENVLRIFLDPLLDVLMKFSTNAYMPLLKTDRCLQLLLKLLNTCRLKGSSAQDDEVSTVLQNFFMSTTESISEFILRRLTMNELNSVSDLDRCHLYLMVLTELINLHLKVGWKRGNPIWRVISLLKNASIQHLQEMDSGQEPTVGSQIQRVVSMAALAMVCEAIDQKPELQLDSLHAGPLESFLSSLQLNQTLQKPHAEEQSSYAHPLECSSVLEESSSSQGWGKIVAQYIHDQWVCLSFLLKKYHTLIPTTGSEILEPFLPAVQMPIRTLQSALEALTVLSSDQVLPVFHCLKVLVPKLLTSSESLCIESFDMAWKIISSLSNTQLIFWANLKAFVQFVFDNKVLTIAAKIKGQAYFKIKEIMYKIIEMSAIKTGVFNTLISYCCQSWIVSASNVSQGSLSSAKNYSELILEACIFGTVFRRDQRLVQDVQTFIENLGHDCAANIVMENTKREDHYVRICAVKFLCLLDGSNMSHKLFIEDLAIKLLDKDELVSKSKKRYYVNSLQHRVKNRVWQTLLVLFPRLDQNFLNGIIDRIFQAGFTNNQASIKYFIEWIIILILHKFPQFLPKFWDCFSYGEENLKTSICTFLAVLSHLDIITQNIPEKKLILKQALIVVLQWCFNHNFSVRLYALVALKKLWTVCKVLSVEEFDALTPVIESSLHQVESMHGAGNAKKNWQRIQEHFFFATFHPLKDYCLETIFYILPRLSGLIEDEWITIDKFTRFTDVPLAAGFQWYLSQTQLSKLKPGDWSQQDIGTNLVEADNQAEWTDVQKKIIPWNSRVSDLDLELLFQDRAARLGKSISRLIVVASLIDKPTNLGGLCRTCEVFGASVLVVGSLQCISDKQFQHLSVSAEQWLPLVEVKPPQLIDYLQQKKTEGYTIIGVEQTAKSLDLTQYCFPEKSLLLLGNEREGIPANLIQQLDVCVEIPQQGIIRSLNVHVSGALLIWEYTRQQLLSHGDTKP

SEQ ID NO: 2039 - protein, 2705 aa, Homo sapiens
MPSTEKDLAEDAPWKKIQQNTFTRWCNEHLKCVGKRLTDLQRDLSDGLRLIALLEVLSQKRMYRKFHPRPNFRQMKLENVSVALEFLEREHIKLVSIDSKAIVDGNLKLILGLIWTLILHYSISMPMWEDEDDEDARKQTPKQRLLGWIQNKVPQLPITNFNRDWQDGKALGALVDNCAPGLCPDWEAWDPNQPVENAREAMQQADDWLGVPQVIAPEEIVDPNVDEHSVMTYLSQFPKAKLKPGAPVRSKQLNPKKAIAYGPGIEPQGNTVLQPAHFTVQTVDAGVGEVLVYIEDPEGHTEEAKVVPNNDKDRTYAVSYVPKVAGLHKVTVLFAGQNIERSPFEVNVGMALGDANKVSARGPGLEPVGNVANKPTYFDIYTAGAGTGDVAVVIVDPQGRRDTVEVALEDKGDSTFRCTYRPAMEGPHTVHVAFAGAPITRSPFPVHVSEACNPNACRASGRGLQPKGVRVKEVADFKVFTKGAGSGELKVTVKGPKGTEEPVKVREAGDGVFECEYYPVVPGKYVVTITWGGYAIPRSPFEVQVSPEAGVQKVRAWGPGLETGQVGKSADFVVEAIGTEVGTLGFSIEGPSQAKIECDDKGDGSCDVRYWPTEPGEYAVHVICDDEDIRDSPFIAHILPAPPDCFPDKVKAFGPGLEPTGCIVDKPAEFTIDARAAGKGDLKLYAQDADGCPIDIKVIPNGDGTFRCSYVPTKPIKHTIIISWGGVNVPKSPFRVNVGEGSHPERVKVYGPGVEKTGLKANEPTYFTVDCSEAGQGDVSIGIKCAPGVVGPAEADIDFDIIKNDNDTFTVKYTPPGAGRYTIMVLFANQEIPASPFHIKVDPSHDASKVKAEGPGLNRTGVEVGKPTHFTVLTKGAGKAKLDVQFAGTAKGEVVRDFEIIDNHDYSYTVKYTAVQQGNMAVTVTYGGDPVPKSPFVVNVAPPLDLSKIKVQGLNSKVAVGQEQAFSVNTRGAGGQGQLDVRMTSPSRRPIPCKLEPGGGAEAQAVRYMPPEEGPYKVDITYDGHPVPGSPFAVEGVLPPDPSKVCAYGPGLKGGLVGTPAPFSIDTKGAGTGGLGLTVEGPCEAKIECQDNGDGSCAVSYLPTEPGEYTINILFAEAHIPGSPFKATIRPVFDPSKVRASGPGLERGKVGEAATFTVDCSEAGEAELTIEILSDAGVKAEVLIHNNADGTYHITYSPAFPGTYTITIKYGGHPVPKFPTRVHVQPAVDTSGVKVSGPGVEPHGVLREVTTEFTVDARSLTATGGNHVTARVLNPSGAKTDTYVTDNGDGTYRVQYTAYEEGVHLVEVLYDEVAVPKSPFRVGVTEGCDPTRVRAFGPGLEGGLVNKANRFTVETRGAGTGGLGLAIEGPSEAKMSCKDNKDGSCTVEYIPFTPGDYDVNITFGGRPIPGSPFRVPVKDVVDPGKVKCSGPGLGAGVRARVPQTFTVDCSQAGRAPLQVAVLGPTGVAEPVEVRDNGDGTHTVHYTPATDGPYTVAVKYADQEVPRSPFKIKVLPAHDASKVRASGPGLNASGIPASLPVEFTIDARDAGEGLLTVQILDPEGKPKKANIRDNGDGTYTVSYLPDMSGRYTITIKYGGDEIPYSPFRIHALPTGDASKCLVTVSIGGHGLGACLGPRIQIGQETVITVDAKAAGEGKVTCTVSTPDGAELDVDVVENHDGTFDIYYTAPEPGKYVITIRFGGEHIPNSPFHVLACDPLPHEEEPSEVPQLRQPYAPPRPGARPTHWATEEPVVPVEPMESMLRPFNLVIPFAVQKGELTGEVRMPSGKTARPNITDNKDGTITVRYAPTEKGLHQMGIKYDGNHIPGSPLQFYVDAINSRHVSAYGPGLSHGMVNKPATFTIVTKDAGEGGLSLAVEGPSKAEITCKDNKDGTCTVSYLPTAPGDYSIIVRFDDKHIPGSPFTAKITGDDSMRTSQLNVGTSTDVSLKITESDLSQLTASIRAPSGNEEPCLLKRLPNRHIGISFTPKEVGEHVVSVRKSGKHVTNSPFKILVGPSEIGDASKVRVWGKGLSEGHTFQVAEFIVDTRNAGYGGLGLSIEGPSKVDINCEDMEDGTCKVTYCPTEPGTYIINIKFADKHVPGSPFTVKVTGEGRMKESITRRRQAPSIATIGSTCDLNLKIPGNWFQMVSAQERLTRTFTRSSHTYTRTERTEISKTRGGETKREVRVEESTQVGGDPFPAVFGDFLGRERLGSFGSITRQQEGEASSQDMTAQVTSPSGKVEAAEIVEGEDSAYSVRFVPQEMGPHTVAVKYRGQHVPGSPFQFTVGPLGEGGAHKVRAGGTGLERGVAGVPAEFSIWTREAGAGGLSIAVEGPSKAEIAFEDRKDGSCGVSYVVQEPGDYEVSIKFNDEHIPDSPFVVPVASLSDDARRLTVTSLQETGLKVNQPASFAVQLNGARGVIDARVHTPSGAVEECYVSELDSDKHTIRFIPHENGVHSIDVKFNGAHIPGSPFKIRVGEQSQAGDPGLVSAYGPGLEGGTTGVSSEFIVNTLNAGSGALSVTIDGPSKVQLDCRECPEGHVVTYTPMAPGNYLIAIKYGGPQHIVGSPFKAKVTGPRLSGGHSLHETSTVLVETVTKSSSSRGSSYSSIPKFSSDASKVVTRGPGLSQAFVGQKNSFTVDCSKAGTNMMMVGVHGPKTPCEEVYVKHMGNRVYNVTYTVKEKGDYILIVKWGDESVPGSPFKVKVP

SEQ ID NO: 2040 - protein, 654 aa, Homo sapiens
MKLSLVAAMLLLLSAARAEEEDKKEDVGTVVGIDLGTTYSCVGVFKNGRVEIIANDQGNRITPSYVAFTPEGERLIGDAAKNQLTSNPENTVFDAKRLIGRTWNDPSVQQDIKFLPFKVVEKKTKPYIQVDIGGGQTKTFAPEEISAMVLTKMKETAEAYLGKKVTHAVVTVPAYFNDAQRQATKDAGTIAGLNVMRIINEPTAAAIAYGLDKREGEKNILVFDLGGGTFDVSLLTIDNGVFEVVATNGDTHLGGEDFDQRVMEHFIKLYKKKTGKDVRKDNRAVQKLRREVEKAKRALSSQHQARIEIESFYEGEDFSETLTRAKFEELNMDLFRSTMKPVQKVLEDSDLKKSDIDEIVLVGGSTRIPKIQQLVKEFFNGKEPSRGINPDEAVAYGAAVQAGVLSGDQDTGDLVLLDVCPLTLGIETVGGVMTKLIPRNTVVPTKKSQIFSTASDNQPTVTIKVYEGERPLTKDNHLLGTFDLTGIPPAPRGVPQIEVTFEIDVNGILRVTAEDKGTGNKNKITITNDQNRLTPEEIERMVNDAEKFAEEDKKLKERIDTRNELESYAYSLKNQIGDKEKLGGKLSSEDKETMEKAVEEKIEWLESHQDADIEDFKAKKKELEEIVQPIISKLYGSAGPPPTGEEDTAEKDEL

SEQ ID NO: 2041 - protein, 480 aa, Homo sapiens
MERDEPPPSGGGGGGGSAGFLEPPAALPPPPRNGFCQDELAELDPGTISVSDDRAEQRTCLICGDRATGLHYGIISCEGCKGFFKRSICNKRVYRCSRDKNCVMSRKQRNRCQYCRLLKCLQMGMNRKAIREDGMPGGRNKSIGPVQISEEEIERIMSGQEFEEEANHWSNHGDSDHSSPGNRASESNQPSPGSTLSSSRSVELNGFMAFREQYMGMSVPPHYQYIPHLFSYSGHSPLLPQQARSLDPQSYSLIHQLLSAEDLEPLGTPMLIEDGYAVTQAELFALLCRLADELLFRQIAWIKKLPFFCELSIKDYTCLLSSTWQELILLSSLTVYSKQIFGELADVTAKYSPSDEELHRFSDEGMEVIERLIYLYHKFHQLKVSNEEYACMKAINFLNQDIRGLTSASQLEQLNKRYWYICQDFTEYKYTHQPNRFPDLMMCLPEIRYIAGKMVNVPLEQLPLLFKVVLHSCKTSVGKE

SEQ ID NO: 2042 - protein, 700 aa, Homo sapiens [sequence omitted]

SEQ ID NO: 2043 - protein, 363 aa, Homo sapiens
MELFQDSGNTDIEGIDTTNACYGGTASLFNAANWMESSSWDGRYAMVVCGDIAVYPSGNARPTGGAGAVAMLIGPKAPLALERGLRGTHMENVYDFYKPNLASEYPIVDGKLSIQCYLRALDRCYTSYRKKIQNQWKQAGSDRPFTLDDLQYMIFHTPFCKMVQKSLARLMFNDFLSASSDTQTSLYKGLEAFGGLKLEDTYTNKDLDKALLKASQDMFDKKTKASLYLSTHNGNMYTSSLYGCLASLLSHHSAQELAGSRIGAFSYGSGLAASFFSFRVSQDAAPGSPLDKLVSSTSDLPKRLASRKCVSPEEFTEIMNQREQFYHKVNFSPPGDTNSLFPGTWYLERVDEQHRRKYARRPV

SEQ ID NO: 2044 - protein, 185 aa, Homo sapiens
MSNGYRTLSQHLNDLKKENFSLKLLIYFLEERMQQKYEASREDIYKRNTELKVEVESLKRELQDKKQHLDKTWADVENLNSQNEAELRRQFEERQQETEHVYELLENKIQLLQEESRLAKNEAARMAALVEAEKECNLELSEKLKGVTKNWEDVPGDQVKPDQYTEALAQRDNPSTDSLKNFRLF

SEQ ID NO: 2045 - protein, 198 aa, Homo sapiens
MPLGLLWLGLALLGALHAQAQDSTSDLIPAPPLSKVPLQQNFQDNQFQGKWYVVGLAGNAILREDKDPQKMYATIYELKEDKSYNVTSVLFRKKKCDYWIRTFVPGCQPGEFTLGNIKSYPGLTSYLVRVVSTNYNQHAMVFFKKVSQNREYFKITLYGRTKELTSELKENFIRFSKSLGLPENHIVFPVPIDQCIDG

SEQ ID NO: 2046 - protein, 1365 aa, Homo sapiens
MDPSGVKVLETAEDIQERRQQVLDRYHRFKELSTLRRQKLEDSYRFQFFQRDAEELEKWIQEKLQIASDENYKDPTNLQGKLQKHQAFEAEVQANSGAIVKLDETGNLMISEGHFASETIRTRLMELHRQWELLLEKMREKGIKLLQAQKLVQYLRECEDVMDWINDKEAIVTSEELGQDLEHVEVLQKKFEEFQTDMAAHEERVNEVNQFAAKLIQEQHPEEELIKTKQDEVNAAWQRLKGLALQRQGKLFGAAEVQRFNRDVDETISWIKEKEQLMASDDFGRDLASVQALLRKHEGLERDLAALEDKVKALCAEADRLQQSHPLSATQIQVKREELITNWEQIRTLAAERHARLNDSYRLQRFLADFRDLTSWVTEMKALINADELASDVAGAEALLDRHQEHKGEIDAHEDSFKSADESGQALLAAGHYASDEVREKLTVLSEERAALLELWELRRQQYEQCMDLQLFYRDTEQVDNWMSKQEAFLLNEDLGDSLDSVEALLKKHEDFEKSLSAQEEKITALDEFATKLIQNNHYAMEDVATRRDALLSRRNALHERAMRRRAQLADSFHLQQFFRDSDELKSWVNEKMKTATDEAYKDPSNLQGKVQKHQAFEAELSANQSRIDALEKAGQKLIDVNHYAKDEVAARMNEVISLWKKLLEATELKGIKLREANQQQQFNRNVEDIELWLYEVEGHLASDDYGKDLTNVQNLQKKHALLEADVAAHQDRIDGITIQARQFQDAGHFDAENIKKKQEALVARYEALKEPMVARKQKLADSLRLQQLFRDVEDEETWIREKEPIAASTNRGKDLIGVQNLLKKHQALQAEIAGHEPRIKAVTQKGNAMVEEGHFAAEDVKAKLHELNQKWEALKAKASQRRQDLEDSLQAQQYFADANEAESWMREKEPIVGSTDYGKDEDSAEALLKKHEALMSDLSAYGSSIQALREQAQSCRQQVAPTDDETGKELVLALYDYQEKSPREVTMKKGDILTLLNSTNKDWWKVEVNDRQGFVPAAYVKKLDPAQSASRENLLEEQGSIALRQEQIDNQTRITKEAGSVSLRMKQVEELYHSLLELGEKRKGMLEKSCKKFMLFREANELQQWINEKEAALTSEEVGADLEQVEVLQKKFDDFQKDLKANESRLKDINKVAEDLESEGLMAEEVQAVQQQEVYGMMPRDETDSKTASPWKSARLMVHTVATFNSIKELNERWRSLQQLAEERSQLLGSAHEVQRFHRDADETKEWIEEKNQALNTDNYGHDLASVQALQRKHEGFERDLAALGDKVNSLGETAERLIQSHPESAEDLQEKCTELNQAWSSLGKRADQRKAKLGDSHDLQRFLSDFRGPHVLDQWNTGVGVLR

SEQ ID NO: 2047 - protein, 352 aa, Homo sapiens
MAPLGYFLLLCSLKQALGSYPIWWSLAVGPQYSSLGSQPILCASIPGLVPKQLRFCRNYVEIMPSVAEGIKIGIQECQHQFRGRRWNCTTVHDSLAIFGPVLDKATRESAFVHAIASAGVAFAVTRSCAEGTAAICGCSSRHQGSPGKGWKWGGCSEDIEFGGMVSREFADARENRPDARSAMNRHNNEAGRQAIASHMHLKCKCHGLSGSCEVKTCWWSQPDFRAIGDFLKDKYDSASEMVVEKHRESRGWVETLRPRYTYFKVPTERDLVYYEASPNFCEPNPETGSFGTRDRTCNVSSHGIDGCDLLCCGRGHNARAERRREKCRCVFHWCCYVSCQECTRVYDVHTCK

SEQ ID NO: 2048 - protein, 381 aa, Homo sapiens
MSGVVRTLSRCLLPAEAGGARERRAGSGARDAEREARRRSRDIDALLARERRAVRRLVKILLLGAGESGKSTFLKQMRIIHGREFDQKALLEFRDTIFDNILKGSRVLVDARDKLGIPWQYSENEKHGMFLMAFENKAGLPVEPATFQLYVPALSALWRDSGIREAFSRRSEFQLGESVKYFLDNLDRIGQLNYFPSKQDILLARKATKGIVEHDFVIKKIPFKMVDVGGQRSQRQKWFQCFDGITSILFMVSSSEYDQVLMEDRRTNRLVESMNIFETIVNNKLFFNVSIILFLNKMDLLVEKVKTVSIKKHFPDFRGDPHRLEDVQRYLVQCFDRKRRNRSKPLFHHFTTAIDTENVRFVFHAVKDTILQENLKDIMLQ

SEQ ID NO: 2049 - protein, 625 aa, Homo sapiens
  VARIANT 365, 366, 367, 368, 369, 370, 371, 372, 373, 374, 375, 376,377, 378, 379, 380, 381, 382, 383, 384, 385, 386, 387, 388,389, 390, 391, 392, 393, 394, 395, 396, 397, 398, 399, 400,401, 402, 403, 404, 405, 406, 407, 408, 409, 410, 411: Xaa = Any Amino Acid
  VARIANT 412, 413, 414, 415, 416, 417, 418, 419, 420, 421, 422, 423,424, 425, 426, 427, 428, 429, 430, 431, 432, 433, 434, 435,436, 437, 438, 439, 440, 441, 442, 443, 444, 445, 446, 447,448, 449: Xaa = Any Amino Acid
MSYSVTLTGPGPWGFRLQGGKDFNMPLTISRITPGSKAAQSQLSQGDLVVAIDGVNTDTMTHLEAQNKIKSASYNLSLTLQKSKRPIPISTTAPPVQTPLPVIPHQKVVVNSPANADYQERFNPSALKDSALSTHKPIEVKGLGGKATIIHAQYNTPISMYSQDAIMDAIAGQAQAQGSDFSGSLPIKDLAVDSASPVYQAVIKSQNKPEDEADEWARRSSNLQSRSFRILAQMTGTEFMQDPDEEALRRSRPQASSYSPAVAASSAPATHTSYSEGPAAPAPKPRVVTTASIRPSVYQPVPASTYSPSPGANYSPTPYTPSPAPAYTPPLPLPTPPHLSPPTLHPQHQPIPRDLPPTITLHPPXXXXXXXXXXXXXXXXXXXXXXXXXXXXXXXXXXXXXXXXXXXXXXXXXXXXXXXXXXXXXXXXXXXXXXXXXXXXXXXXXXXXXGPFLVAMGRSWHPEEFTCAYCKTSLADVCFVEEQNNVYCERCYEQFFAPLCAKCNTKIMGGSNACLETDMAHHLLRLCGLQEAFWEQPLPHGRRGALLRERLHQSVQHQVPWLRFPRGGWRQVYRSPGPHLARHLLHLRSLPCESGGAAVLLQEGQTPVQEARTHHQLVGGQGRLC

SEQ ID NO: 2050 - protein, 735 aa, Homo sapiens
  VARIANT 475, 476, 477, 478, 479, 480, 481, 482, 483, 484, 485, 486,487, 488, 489, 490, 491, 492, 493, 494, 495, 496, 497, 498,499, 500, 501, 502, 503, 504, 505, 506, 507, 508, 509, 510,511, 512, 513, 514, 515, 516, 517, 518, 519, 520, 521: Xaa = Any Amino Acid
  VARIANT 522, 523, 524, 525, 526, 527, 528, 529, 530, 531, 532, 533,534, 535, 536, 537, 538, 539, 540, 541, 542, 543, 544, 545,546, 547, 548, 549, 550, 551, 552, 553, 554, 555, 556, 557,558, 559: Xaa = Any Amino Acid
MSYSVTLTGPGPWGFRLQGGKDFNMPLTISRITPGSKAAQSQLSQGDLVVAIDGVNTDTMTHLEAQNKIKSASYNLSLTLQKSKRPIPISTTAPPVQTPLPVIPHQKDPALDTNGSLVAPSPSPEARASPGTPGTPELRPTFSPAFSRPSAFSSLAEASDPGPPRASLRAKTSPEGARDLLGPKALPGSSQPRQYNNPIGLYSAETLREMAQMYQMSLRGKASGVGLPGGSLPIKDLAVDSASPVYQAVIKSQNKPEDEADEWARRSSNLQSRSFRILAQMTGTEFMQDPDEEALRRSSTPIEHAPVCTSQATTPLLPASAQPPAAASPSAASPPLATAAAHTAIASASTTAPASSPADSPRPQASSYSPAVAASSAPATHTSYSEGPAAPAPKPRVVTTASIRPSVYQPVPASTYSPSPGANYSPTPYTPSPAPAYTPPLPLPTPPHLSPPTLHPQHQPIPRDLPPTITLHPPXXXXXXXXXXXXXXXXXXXXXXXXXXXXXXXXXXXXXXXXXXXXXXXXXXXXXXXXXXXXXXXXXXXXXXXXXXXXXXXXXXXXXGPFLVAMGRSWHPEEFTCAYCKTSLADVCFVEEQNNVYCERCYEQFFAPLCAKCNTKIMGGSNACLETDMAHHLLRLCGLQEAFWEQPLPHGRRGALLRERLHQSVQHQVPWLRFPRGGWRQVYRSPGPHLARHLLHLRSLPCESGGAAVLLQEGQTPVQEARTHHQLVGGQGRLC

SEQ ID NO: 2051 - protein, 1275 aa, Homo sapiens
MVQGPVQTPALTIHRRKRRRSCPPNRASYLPKAESLASLGSHLPALLSRARVPRPPAGRRERERRRRPVAKAPARLRGEYETGVKMTSRFGKTYSRKGGNGSSKFDEVFSNKRTTLSTKWGETTFMAKLGQKRPNFKPDIQEIPKKPKVEEESTGDPFGFDSDDESLPVSSKNLAQVKCSSYSESSEAAQLEEVTSVLEANSKISHVVVEDTVVSDKCFPLEDTLLGKEKSTNRIVEDDASISSCNKLITSDKVENFHEEHEKNSHHIHKNADDSTKKPNAETTVASEIKETNDTWNSQFGKRPESPSEISPIKGSVRTGLFEWDNDFEDIRSEDCILSLDSDPLLEMKDDDFKNRLENLNEAIEEDIVQSVLRPTNCRTYCRANKTKSSQGASNFDKLMDGTSQALAKANSESSKDGLNQAKKGGVSCGTSFRGTVGRTRDYTVLHPSCLSVCNVTIQDTMERSMDEFTASTPADLGEAGRLRKKADIATSKTTTRFRPSNTKSKKDVKLEFFGFEDHETGGDEGGSGSSNYKIKYFGFDDLSESEDDEDDDCQVERKTSKKRTKTAPSPSLQPPPESNDNSQDSQSGTNNAENLDFTEDLPGVPESVKKPINKQGDKSKENTRKIFSGPKRSPTKAVYNARHWNHPDSEELPGPPVVKPQSVTVRLSSKEPNQKDDGVFKAPAPPSKVIKTVTIPTQPYQDIVTALKCRREDKELYTVVQHVKHFNDVVEFGENQEFTDDIEYLLSGLKSTQPLNTRCLSVISLATKCAMPSFRMHLRAHGMVAMVFKTLDDSQHHQNLSLCTAALMYILSRDRLNMDLDRASLDLMIRLLELEQDASSAKLLNEKDMNKIKEKIRRLCETVHNKHLDLENITTGHLAMETLLSLTSKRAGDWFKEELRLLGGLDHIVDKVKECVDHLSRDEDEEKLVASLWGAERCLRVLESVTVHNPENQSYLIAYKDSQLIVSSAKALQHCEELIQQYNRAEDSICLADSKPLPHQNVTNHVGKAVEDCMRAIIGVLLNLTNDNEWGSTKTGEQDGLIGTALNCVLQVPKYLPQEQRFDIRVLGLGLLINLVEYSARNRHCLVNMETSCSFDSSICSGEGDDSLRIGGQVHAVQALVQLFLERERAAQLAESKTDELIKDAPTTQHDKSGEWQETSGEIQWVSTEKTDGTEEKHKKEEEDEELDLNKALQHAGKHMEDCIVASYTALLLGCLCQESPINVTTVREYLPEGDFSIMTEMLKKFLSFMNLTCAVGTTGQKSISRVIEYLEHC

SEQ ID NO: 2052 - protein, 188 aa, Homo sapiens [sequence omitted]

SEQ ID NO: 2053 - protein, 621 aa, Homo sapiens; identical to SEQ ID NO: 1059

SEQ ID NO: 2054 - protein, 1454 aa, Homo sapiens
MFAFDAVFPQDSEQAEVCSGTVADVLQSVVSGADGCIFSFGHMSLGKSYTMIGKDSSPQSLGIVPCAISWLFRLIEERRERTGTRFSVRVSAVEVCGRDQSLRDLLAEVAPGSLQDTQSPGVYLREDPVCGAQLQNQSELRAPTAEKAAFYLDAALAARSTSRAGCGEDARRSSHMLFTLHVYQYRMEKCGRGGMSGGRSRLHLIDLGSCEAAAGRAGEAAGGPLCLSLSALGSVILALVNGAKHVPYRDHRLTMLLRESLATAGCRTTMIAHVSDAPAQHAETLSTVQLAARIHRLRRKKAKYASSSSGGESSCEEGRARRPPHLRPFHPRTVALDPDRTPPCLPGDPDYSSSSEQSCDTVIYVGPGGAALSDRELTDNEGPPDFVPIIPALSRHRPSKGPRDADHFRCSTFAELQERLECMDGNEGPSGGPGGTDGAQASPARGGRKPSPPEAASPRKAVGTPMAASTPRGSSGPDTHQGTPEPCKAIVWGDQREDSSAWPELLVPEKAAVSGGRRPLPSPAPPPPQLLEACRAPEEPGGGGTDGVARTPPVGMSGQVAGSPMLPGATCPRLAAGSRCPERGLLTTTVTLQRPVELNGEDELVFTVVEELSLGALAGAGRPTSLASFDSDCSLRALASGSRPVSIISSINDEFDAYTSQAPEGGPLEGAAWAGSSHGSSISSWLSEVSVCTADSRDPTPQPRFSPDSLAGLDPGGPPALDGSLGDGSSGFLGPDRPDSPGPTWGPCPGEVAAVAPSRPGREPQAGPSRWASAAQTIHSSLPRKPRTASATTRVGCARLGQSPPGRGGLFEDPWLLRVGECDTQAASAGRAPSPTLGSPRLPEAQVMLACAQRVVDGCEVAARAARRPEAVARIPPLRRGATTLGVTTPAVSWGDAPTEVVACSGSLKASPTSKKGLAPKAGFLPRPSGAAPPAPPTRKSSLEQRSSPASAPPHAVNPARVGAAAVLRGEEEPRPSSRADHSVPRATSSLKARASKVEAAHRLAGHASLERYEGLAHSSSKGREAPGRPPRAVPKLGVPPSSPTHGPAPACRSGAAKAVGAPKPPVGGGKGRGLVAGGSRALGPSVKLSTASVTGRSPGGPVAGPRAAPRAGPSVGAKAGRGTVMGTKQALRAAHSRVHELSASGAPGRGGSSWGSADSDSGHDSGVNVGEERPPTGPALPSPYSKVTAPRRPQRYSSGHGSDNSSVLSGELPPAMGRTALFHHSGGSSGYESLRRDSEATGSASSAPDSMSESGAASPGARTRSLKSPKKRATGLQRRRLIPAPLPDTTALGRKPSLPGQWVDLPPPLAGSLKEPFEIKVYEIDDVERLQRPRPTPREAPTQGLACVSTRLRLAERRQQRLREVQAKHKHLCEELAETQGRLMLEPGRWLEQFEVDPELEPESAEYLAALERATAALEQCVNLCKAHVMMVTCFDISVAASAAIPGPQEVDV

SEQ ID NO: 2055 - protein, 207 aa, Homo sapiens
MTSRKKVLLKVIILGDSGVGKTSLMNQYVNKKFSNQYKATIGADFLTKEVMVDDRLVTMQIWDTAGQERFQSLGVAFYRGADCCVLVFDVTAPNTFKTLDSWRDEFLIQASPRDPENFPFVVLGNKIDLENRQVATKRAQAWCYSKNNIPYFETSAKEAINVEQAFQTIARNALKQETEVELYNEFPEPIKLDKNDRAKASAESCSC

SEQ ID NO: 2056 - protein, 467 aa, Homo sapiens [sequence omitted]

SEQ ID NO: 2057 - protein, 678 aa, Homo sapiens
MAVKVQTTKRGDPHELRNIFLQYASTEVDGERYMTPEDFVQRYLGLYNDPNSNPKIVQLLAGVADQTKDGLISYQEFLAFESVLCAPDSMFIVAFQLFDKSGNGEVTFENVKEIFGQTIIHHHIPFNWDCEFIRLHFGHNRKKHLNYTEFTQFLQELQLEHARQAFALKDKSKSGMISGLDFSDIMVTIRSHMLTPFVEENLVSAAGGSISHQVSFSYFNAFNSLLNNMELVRKIYSTLAGTRKDVEVTKEEFAQSAIRYGQVTPLEIDILYQLADLYNASGRLTLADIERIAPLAEGALPYNLAELQRQQSPGLGRPIWLQIAESAYRFTLGSVAGAVGATAVYPIDLVKTRMQNQRGSGSVVGELMYKNSFDCFKKVLRYEGFFGLYRGLIPQLIGVAPEKAIKLTVNDFVRDKFTRRDGSVPLPAEVLAGGCAGGSQVIFTNPLEIVKIRLQVAGEITTGPRVSALNVLRDLGIFGLYKGAKACFLRDIPFSAIYFPVYAHCKLLLADENGHVGGLNLLAAGAMAGVPAASLVTPADVIKTRLQVAARAGQTTYSGVIDCFRKILREEGPSAFWKGTAARVFRSSPQFGVTLVTYELLQRWFYIDFGGLKPAGSEPTPKSRIADLPPANPDHIGGYRLATATFAGIENKFGLYLPKFKSPSVAVVQPKAAVAATQ

SEQ ID NO: 2058 - protein, 152 aa, Homo sapiens
MEAVLNELVSVEDLLKFEKKFQSEKAAGSVSKSTQFEYAWCLVRSKYNDDIRKGIVLLEELLPKGSKEEQRDYVFYLAVGNYRLKEYEKALKYVRGLLQTEPQNNQAKELERLIDKAMKKDGLVGMAIVGGMALGVAGLAGLIGLAVSKSKS

SEQ ID NO: 2059 - protein, 356 aa, Homo sapiens
MTQVDQEDITLQSGRDELNEELIQEESSEDEGEYEEVRKDQDSVGEMKDEGEETLNYPDTTIDLSHLQPQRSIQKLASKEESSNSSDSKSQSRRHLSAKERREMKKKKLPSDSGDLEALEGKDKEKESTVHIETHQNTSKNVAAVQPMKRGQKSKMKKMKEKYKDQDEEDRELIMKLLGSAGSNKEEKGKKGKKGKTKDEPVKKQPQKPRGGQRVSDNIKKETPFLEVITHELQDFAVDDPHDDKEEQDLDQQGNEENLFDSLTGQPHPEDVLLFAIPICAPYTTMTNYKYKVKLTPGVQKKGKAAKTALNSFMHSKEATAREKDLFRSVKDTDLSRNIPGKVKVSAPNLLNVKRK

SEQ ID NO: 2060 - protein, 166 aa, Homo sapiens
  VARIANT 3, 4, 5, 6, 7, 8, 32, 33, 34, 35, 36, 37, 38, 39, 40, 41,42, 43, 44, 45, 46, 47, 48, 49, 50, 51, 52, 53, 54, 55,56: Xaa = Any Amino Acid
MNXXXXXXFDIIGLSPDSQEDESGIKQAAENXXXXXXXXXXXXXXXXXXXXXXXXXGGALSLYTALTTQQKLAGVTALSCWLPLRASFPQGPIGGANRDISILQCHGDCDPLVPLMFGSLTVEKLKTLVNPANVTFKTYEGMMHSSCQQEMMDVKQFIDKLLPPID

SEQ ID NO: 2061 - protein, 794 aa, Homo sapiens
MADAWEEIRRLAADFQRAQFAEATQRLSERNCIEIVNKLIAQKQLEVVHTLDGKEYITPAQISKEMRDELHVRGGRVNIVDLQQVINVDLIHIENRIGDIIKSEKHVQLVLGQLIDENYLDRLAEEVNDKLQESGQVTISELCKTYDLPGNFLTQALTQRLGRIISGHIDLDNRGVIFTEAFVARHKARIRGLFSAITRPTAVNSLISKYGFQEQLLYSVLEELVNSGRLRGTVVGGRQDKAVFVPDIYSRTQSTWVDSFFRQNGYLEFDALSRLGIPDAVSYIKKRYKTTQLLFLKAACVGQGLVDQVEASVEEAISSGTWVDIAPLLPTSLSVEDAAILLQQVMRAFSKQASTVVFSDTVVVSEKFINDCTELFRELMHQKAEKEMKNNPVHLITEEDLKQISTLESVSTSKKDKKDERRRKATEGSGSMRGGGGGNAREYKIKKVKKKGRKDDDSDDESQSSHTGKKKPEISFMFQDEIEDFLRKHIQDAPEEFISELAEYLIKPLNKTYLEVVRSVFMSSTTSASGTGRKRTIKDLQEEVSNLYNNIRLFEKGMKFFADDTQAALTKHLLKSVCTDITNLIFNFLASDLMMAVDDPAAITSEIRKKILSKLSEETKVALTKLHNSLNEKSIEDFISCLDSAAEACDIMVKRGDKKRERQILFQHRQALAEQLKVTEDPALILHLTSVLLFQFSTHSMLHAPGRCVPQIIAFLNSKIPEDQHALLVKYQGLVVKQLVSQSKKTGQGDYPLNNELDKEQEDVASTTRKELQELSSSIKDLVLKSRKSSVTEE

SEQ ID NO: 2062 - protein, 1085 aa, Homo sapiens
MGYMGEMEVQGPTRESGQSLPPQKKAYLSHLSTGSGHIEGDWAGRNRKLLKPRSIQKSWFVQFPWLIMNEEQTALFCSACREYPSIRDKRSRLIEGYTGPFKVETLKYHAKSKAHMFCVNALAARDPIWAARFRSIRDPPGDVLASPEPLFTADCPIFYPPGPLGGFDSMAELLPSSRAELEDPGGDGAIPAMYLDCISDLRQKEITDGIHSSSDINILYNDAVESCIQDPSAEGLSEEVPVVFEELPVVFEDVAVYFTREEWGMLDKRQKELYRDVMRMNYELLASLGPAAAKPDLISKLERRAAPWIKDPNGPKWGKGRPPGNKKMVAVREADTQASAADSALLPGSPVEARASCCSSSICEEGDGPRRIKRTYRPRSIQRSWFGQFPWLVIDPKETKLFCSACIERPNLHDKSSRLVRGYTGPFKVETLKYHEVSKAHRLCVNTVEIKEDTPHTALVPEISSDLMANMEHFFNAAYSIAYHSRPLNDFEKILQLLQSTGTVILGKYRNRTACTQFIKYISETLKREILEDVRNSPCVSVLLDSSTDASEQACVGIYIRYFKQMEVKESYITLAPLYSETADGYFETIVSALDELDIPFRKPGWVVGLGTDGSAMLSCRGGLVEKFQEVIPQLLPVHCVAHRLHLAVVDACGSIDLVKKCDRHIRTVFKFYQSSNKRLNELQEGAAPLEQEIIRLKDLNAVRWVASRRRTLHALLVSWPALARHLQRVAEAGGQIGHRAKGMLKLMRGFHFVKFCHFLLDFLSIYRPLSEVCQKEIVLITEVNATLGRAYVALESLRHQAGPKEEEFNASFKDGRLHGICLDKLEVAEQRFQADRERTVLTGIEYLQQRFDADRPPQLKNMEVFDTMAWPSGIELASFGNDDILNLARYFECSLPTGYSEEALLEEWLGLKTIAQHLPFSMLCKNALAQHCRFPLLSKLMAVVVCVPISTSCCERGFKAMNRIRTDERTKLSNEVLNMLMMTAVNGVAVTEYDPQPAIQHWYLTSSGRRFSHVYTCAQVPARSPASARLRKEEMGALYVEEPRTQKPPILPSREAAEVLKDCIMEPPERLLYPHTSQEAPGMS

SEQ ID NO: 2063 - protein, 1191 aa, Homo sapiens
MSSPMPDCTSKCRSLKHALDVLSVVTKGSENQIKAFLSSHCYNAATIKDVFGRNALHLVSSCGKKGVLDWLIQKGVDLLVKDKESGWTALHRSIFYGHIDCVWSLLKHGVSLYIQDKEGLSALDLVMKDRPTHVVFKNTDPTDVYTWGDNTNFTLGHGSQNSKHHPELVDLFSRSGIYIKQVVLCKFHSVFLSQKGQVYTCGHGPGGRLGHGDEQTCLVPRLVEGLNGHNCSQVAAAKDHTVVLTEDGCVYTFGLNIFHQLGIIPPPSSCNVPRQIQAKYLKGRTIIGVAAGRFHTVLWTREAVYTMGLNGGQLGCLLDPNGEKCVTAPRQVSALHHKDIALSLVAASDGATVCVTTRGDIYLLADYQCKKMASKQLNLKKVLVSGGHMEYKVDPEHLKENGGQKICILAMDGAGRVFCWRSVNSSLKQCRWAYPRQVFISDIALNRNEILFVTQDGEGFRGRWFEEKRKSSEKKEILSNLHNSSSDVSYVSDINSVYERIRLEKLTFAHRAVSVSTDPSGCNFAILQSDPKTSLYEIPAVSSSSFFEEFGKLLREADEMDSIHDVTFQVGNRLFPAHKYILAVHSDFFQKLFLSDGNTSEFTDIYQKDEDSAGCHLFVVEKVHPDMFEYLLQFIYTDTCDFLTHGFKPRIHLNKNPEEYQGTLNSHLNKVNFHEDDNQKSAFEVYKSNQAQTVSERQKSKPKSCKKGKNIREDDPVRMLQTVAKKFDFSNLSSRLDGVRFENEKINVIAKNTGNKLKLSQKKCSFLCDVTMKSVDGKEFPCHKCVLCARLEYFHSMLSSSWIEASSCAALEMPIHSDILKVILDYLYTDEAVVIKESQNVDFICSVLVVADQLLITRLKEICEVALTEKLTLKNAAMLLEFAAMYSAKQLKLSCLQFIGLNMAALLEARSLDVLSDGVLKDLSEFYRKMIPAMDRRVITPYQDGPDISYLEVEDGDIFLKEEINMEQNHSETMFKKAKTKAKKKPRKRSDSSGGYNLSDIIQSPSSTGLLKSGKTNSVESLPELLTSDSEGSYAGVGSPRDLQSPDFTTGFHSDKIEAKVKPYVNGTSPVYSREDLKPWEKSPILKISAPQPIPSNRIDTTSSASWVAGSFSPVSPPVVDLRTIMEIEESRQKCGATPKSHLGKTVSHGVKLSQKQRKMIALTTKENNSGMNSMETVLFTPSKAPKPVNA

SEQ ID NO: 2064 - protein, 396 aa, Homo sapiens
MVDFAMDVYKNLYSDDIPHALREKRTTVVAQLKQLQAETEPIVKMFEDPETTRQMQSTRDGRMLFDYLADKHGFRQEYLDTLYRYAKFQYECGNYSGAAEYLYFFRVLVPATDRNALSSLWGKLASEILMQNWDAAMEDLTRLKETIDNNSVSSPLQSLQQRTWLIHWSLFVFFNHPKGRDNIIDLFLYQPQYLNAIQTMCPHILRYLTTAVITNKDVRKRRQVLKDLVKVIQQESYTYKDPITEFVECLYVNFDFDGAQKKLRECESVLVNDFFLVACLEDFIENARLFIFETFCRIHQCISINMLADKLNMTPEEAERWIVNLIRNARLDAKIDSKLGHVVMGNNAVSPYQQVIEKTKSLSFRSQMLAMNIEKKLNQNSRSEAPNWATQDSGFY

SEQ ID NO: 2065 - protein, 403 aa, Homo sapiens
MVCPPGEVPVFWPSPLTSLGAVSSCETPLAFASIPGCTVMTDLKDAKAPPGCLTPERIPEVHHISQDPLHYSIASVSASQKIRELESMIGIDPGNRGIGHLLCKDELLKASLSLSHARSVLITTGFPTHFNHEPPEETDGPPGAVALVAFLQALEKEVAIIVDQRAWNLHQKIVEDAVEQGVLKTQIPILTYQGGSVEAAQAFLCKNGDPQTPRFDHLVAIERAGRAADGNYYNARKMNIKHLVDPIDDLFLAAKKIPGISSTGVGDGGNELGMGKVKEAVRRHIRHGDVIACDVEADFAVIAGVSNWGGYALACALYILYSCAVHSQYLRKAVGPSRAPGDQAWTQALPSVIKEEKMLGILVQHKVRSGVSGIVGMEVDGLPFHNTHAEMIQKLVDVTTAQV

SEQ ID NO: 2066 - protein, 1935 aa, Homo sapiens
MEARAIVRQAMAILTPAVPARMEDGHQMLTHWTRKIIVEEGHTVPQLVHILHLIVQHFKVYYPVRHHLVQHMVSAMQRLGFTPSVTIEQRRLAVDLSEVVIKWELQRIKDQQPDSDMDPNSSGEGVNSVSSSIKRGLSVDSAQEVKRFRTATGAISAVFGRSQSLPGADSLLAKPIDKQHTDTVVNFLIRVACQVNDNTNTAGSPGEVLSRRCVNLLKTALRPDMWPKSELKLQWFDKLLMTVEQPNQVNYGNICTGLEVLSFLLTVLQSPAILSSFKPLQRGIAACMTCGNTKVLRAVHSLLSRLMSIFPTEPSTSSVASKYEELECLYAAVGKVIYEGLTNYEKATNANPSQLFGTLMILKSACSNNPSYIDRLISVFMRSLQKMVREHLNPQAASGSTEATSGTSELVMLSLELVKTRLAVMSMEMRKNFIQAILTSLIEKSPDAKILRAVVKIVEEWVKNNSPMAANQTPTLREKSILLVKMMTYIEKRFPEDLELNAQFLDLVNYVYRDETLSGSELTAKLEPAFLSGLRCAQPLIRAKFFEVFDNSMKRRVYERLLYVTCSQNWEAMGNHFWIKQCIELLLAVCEKSTPIGTSCQGAMLPSITNVINLADSHDRAAFAMVTHVKQEPRERENSESKEEDVEIDIELAPGDQTSTPKTKELSEKDIGNQLHMLTNRHDKFLDTLREVKTGALLSAFVQLCHISTTLAEKTWVQLFPRLWKILSDRQQHALAGEISPFLCSGSHQVQRDCQPSALNCFVEAMSQCVPPIPIRPCVLKYLGKTHNLWFRSTLMLEHQAFEKGLSLQIKPKQTTEFYEQESITPPQQEILDSLAELYSLLQEEDMWAGLWQKRCKYSETATAIAYEQHGFFEQAQESYEKAMDKAKKEHERSNASPAIFPEYQLWEDHWIRCSKELNQWEALTEYGQSKGHINPYLVLECAWRVSNWTAMKEALVQVEVSCPKEMAWKVNMYRGYLAICHPEEQQLSFIERLVEMASSLAIREWRRLPHVVSHVHTPLLQAAQQIIELQEAAQINAGLQPTNLGRNNSLHDMKTVVKTWRNRLPIVSDDLSHWSSIFMWRQHHYQAIVTAYENSSQHDPSSNNAMLGVHASASAIIQYGKIARKQGLVNVALDILSRIHTIPTVPIVDCFQKIRQQVKCYLQLAGVMGKNECMQGLEVIESTNLKYFTKEMTAEFYALKGMFLAQINKSEEANKAFSAAVQMHDVLVKAWAMWGDYLENIFVKERQLHLGVSAITCYLHACRHQNESKSRKYLAKVLWLLSFDDDKNTLADAVDKYCIGVPPIQWLAWIPQLLTCLVGSEGKLLLNLISQVGRVYPQAVYFPIRTLYLTLKIEQRERYKSDPGPIRATAPMWRCSRIMHMQRELHPTLLSSLEGIVDQMVWFRENWHEEVLRQLQQGLAKCYSVAFEKSGAVSDAKITPHTLNFVKKLVSTFGVGLENVSNVSTMFSSAASESLARRAQATAQDPVFQKLKGQFTTDFDFSVPGSMKLHNLISKLKKWIKILEAKTKQLPKFFLIEEKCRFLSNFSAQTAEVEIPGEFLMPKPTHYYIKIARFMPRVEIVQKHNTAARRLYIRGHNGKIYPYLVMNDACLTESRREERVLQLLRLLNPCLEKRKETTKRHLFFTVPRVVAVSPQMRLVEDNPSSLSLVEIYKQRCAKKGIEHDNPISRYYDRLATVQARGTQASHQVLRDILKEVQSNMVPRSMLKEWALHTFPNATDYWTFRKMFTIQLALIGFAEFVLHLNRLNPEMLQIAQDTGKLNVAYFRFDINDATGDLDANRPVPFRLTPNISEFLTTIGVSGPLTASMIAVARCFAQPNFKVDGILKTVLRDEIIAWHKKTQEDTSSPLSAAGQPENMDSQQLVSLVQKAVTAIMTRLHNLAQFEGGESKVNTLVAAANSLDNLCRMDPAWHPWL

SEQ ID NO: 2067 - protein, 973 aa, Homo sapiens
MASILDEYENSLSRSAVLQPGCPSVGIPHSGYVNAQLEKEVPIFTKQRIDFTPSERITSLVVSSNQLCMSLGKDTLLRIDLGKANEPNHVELGRKDDAKVHKMFLDHTGSHLLIALSSTEVLYVNRNGQKVRPLARWKGQLVESVGWNKALGTESSTGPILVGTAQGHIFEAELSASEGGLFGPAPDLYFRPLYVLNEEGGPAPVCSLEAERGPDGRSFVIATTRQRLFQFIGRAAEGAEAQGFSGLFAAYTDHPPPFREFPSNLGYSELAFYTPKLRSAPRAFAWMMGDGVLYGALDCGRPDSLLSEERVWEYPEGVGPGASPPLAIVLTQFHFLLLLADRVEAVCTLTGQVVLRDHFLEKFGPLKHMVKDSSTGQLWAYTERAVFRYHVQREARDVWRTYLDMNRFDLAKEYCRERPDCLDTVLAREADFCFRQRRYLESARCYALTQSYFEEIALKFLEARQEEALAEFLQRKLASLKPAERTQATLLTTWLTELYLSRLGALQGDPEALTLYRETKECFRTFLSSPRHKEWLFASRASIHELLASHGDTEHMVYFAVIMQDYERVVAYHCQHEAYEEALAVLARHRDPQLFYKFSPILIRHIPRQLVDAWIEMGSRLDARQLIPALVNYSQGGEVQQVSQAIRYMEFCVNVLGETEQAIHNYLLSLYARGRPDSLLAYLEQAGASPHRVHYDLKYALRLCAEHGHHRACVHVYKVLELYEEAVDLALQVDVDLAKQCADLPEEDEELRKKLWLKIARHVVQEEEDVQTAMACLASCPLLKIEDVLPFFPDFVTIDHFKEAICSSLKAYNHHIQELQREMEEATASAQRIRRDLQELRGRYGTVEPQDKCATCDFPLLNRPFYLFLCGHMFHADCLLQAVRPGLPAYKQARLEELQRKLGAAPPPAKGSARAKEAEGGAATAGPSREQLKADLDELVAAECVYCGELMIRSIDRPFIDPQRYEEEQLSWL

SEQ ID NO: 2068 - protein, 1833 aa, Homo sapiens
MDGVSSEANEENDNIERPVRRRHSSILKPPRSPLQDLRGGNERVQESNALRNKKNSRRVSFADTIKVFQTESHMKIVRKSEMEETETGENLLLIQNKKLEDNYCEITGMNTLLSAPIHTQMQQKEFSIIEHTRERKHANDQTVIFSDENQMDLTSSHTVMITKGLLDNPISEKSTKIDTTSFLANLKLHTEDSRMKKEVNFSVDQNTSSENKIDFNDFIKRLKTGKCSAFPDVPDKENFEIPIYSKEPNSASSTHQMHVSLKEDENNSNITRLFREKDDGMNFTQCHTANIQTLIPTSSETNSRESKGNDITIYGNDFMDLTFNHTLQILPATGNFSEIENQTQNAMDVTTGYGTKASGNKTVFKSKQNTAFQDLSINSADKIHITRSHIMGAETHIVSQTCNQDARILAMTPESIYSNPSIQGCKTVFYSSCNDAMEMTKCLSNMREEKNLLKHDSNYAKMYCNPDAMSSLTEKTIYSGEENMDITKSHTVAIDNQIFKQDQSNVQIAAAPTPEKEMMLQNLMTTSEDGKMNVNCNSVPHVSKERIQQSLSNPLSISLTDRKTELLSGENMDLTESHTSNLGSQVPLAAYNLAPESTSESHSQSKSSSDECEEITKSRNEPFQRSDIIAKNSLTDTWNKDKDWVLKILPYLDKDSPQSADCNQEIATSHNIVYCGGVLDKQITNRNTVSWEQSLFSTTKPLFSSGQFSMKNHDTAISSHTVKSVLGQNSKLAEPLRKSLSNPTPDYCHDKMIICSEEEQNMDLTKSHTVVIGFGPSELQELGKTNLEHTTGQLTTMNRQIAVKVEKCGKSPIEKSGVLKSNCIMDVLEDESVQKPKFPKEKQNVKIWGRKSVGGPKIDKTIVFSEDDKNDMDITKSYTIEINHRPLLEKRDCHLVPLAGTSETILYTCRQDDMEITRSHTTALECKTVSPDEITTRPMDKTVVFVDNHVELEMTESHTVFIDYQEKERTDRPNFELSQRKSLGTPTVICTPTEESVFFPGNGESDRLVANDSQLTPLEEWSNNRGPVEVADNMELSKSATCKNIKDVQSPGFLNEPLSSKSQRRKSLKLKNDKTIVFSENHKNDMDITQSCMVEIDNESALEDKEDFHLAGASKTILYSCGQDDMEITRSHTTALECKTLLPNEIAIRPMDKTVLFTDNYSDLEVTDSHTVFIDCQATEKILEENPKFGIGKGKNLGVSFPKDNSCVQEIAEKQALAVGNKIVLHTEQKQQLFAATNRTTNEIIKFHSAAMDEKVIGKVVDQACTLEKAQVESCQLNNRDRRNVDFTSSHATAVCGSSDNYSCLPNVISCTDNLEGSAMLLCDKDEEKANYCPVQNDLAYANDFASEYYLESEGQPLSAPCPLLEKEEVIQTSTKGQLDCVITLHKDQDLIKDPRNLLANQTLVYSQDLGEMTKLNSKRVSFKLPKDQMKVYVDDIYVIPQPHFSTDQPPLPKKGQSSINKEEVILSKAGNKSLNIIENSSAPICENKPKILNSEEWFAAACKKELKENIQTTNYNTALDFHSNSDVTKQVIQTHVNAGEAPDPVITSNVPCFHSIKPNLNNLNGKTGEFLAFQTVHLPPLPEQLLELGNKAHNDMHIVQATEIHNINIISSNAKDSRDEENKKSHNGAETTSLPPKTVFKDKVRRCSLGIFLPRLPNKRNCSVTGIDDLEQIPADTTDINHLETQPVSSKDSGIGSVAGKLNLSPSQYINEENLPVYPDEINSSDSINIETEEKALIETYQKEISPYENKMGKTCNSQKRTWVQEEEDIHKEKKIRKNEIKFSDTTQDREVSSVLNQRMFLNFGFCFVFLNCGYSQILILVSGRQKIIIST

SEQ ID NO: 2069 - protein, 1050 aa, Homo sapiens
MAAVKKEGGALSEAMSLEGDEWELSKENVQPLRQGRIMSTLQGALAQESACNNTLQQQKRAFEYEIRFYTGNDPLDVWDRYISWTEQNYPQGGKESNMSTLLERAVEALQGEKRYYSDPRFLNLWLKLGRLCNEPLDMYSYLHNQGIGVSLAQFYISWAEEYEARENFRKADAIFQEGIQQKAEPLERLQSQHRQFQARVSRQTLLALEKEEEEEVFESSVPQRSTLAELKSKGKKTARAPIIRVGGALKAPSQNRGLQNPFPQQMQNNSRITVFDENADEASTAELSKPTVQPWIAPPMPRAKENELQAGPWNTGRSLEHRPRGNTASLIAVPAVLPSFTPYVEETARQPVMTPCKIEPSINHILSTRKPGKEEGDPLQRVQSHQQASEEKKEKMMYCKEKIYAGVGEFSFEEIRAEVFRKKLKEQREAELLTSAEKRAEMQKQIEEMEKKLKEIQTTQQERTGDQQEETMPTKETTKLQIASESQKIPGMTLSSSVCQVNCCARETSLAENIWQEQPHSKGPSVPFSIFDEFLLSEKKNKSPPADPPRVLAQRRPLAVLKTSESITSNEDVSPDVCDEFTGIEPLSEDAIITGFRNVTICPNPEDTCDFARAARFVSTPFHEIMSLKDLPSDPERLLPEEDLDVKTSEDQQTACGTIYSQTLSIKKLSPIIEDSREATHSSGFSGSSASVASTSSIKCLQIPEKLELTNETSENPTQSPWCSQYRRQLLKSLPELSASAELCIEDRPMPKLEIEKEIELGNEDYCIKREYLICEDYKLFWVAPRNSAELTVIKVSSQPVPWDFYINLKLKERLNEDFDHFCSCYQYQDGCIVWHQYINCFTLQDLLQHSEYITHEITVLIIYNLLTIVEMLHKAEIVHGDLSPRCLILRNRIHDPYDCNKNNQALKIVDFSYSVDLRVQLDVFTLSGFRTVQILEGQKILANCSSPYQVDLFGIADLAHLLLFKEHLQVFWDGSFWKLSQNISELKDGELWNKFFVRILNANDEATVSVLGELAAEMNGVFDTTFQSHLNKALWKVGKLTSPGALLFQ

SEQ ID NO: 2070 - protein, 1455 aa, Homo sapiens
MAKQERLEIASLSNQDHTSKKDPGGHRTAAILHGGSPDFVGNGKHRANSSGRSRRERQYSVCNSEDSPGSCEILYFNMGSPDQLMVHKGKCIGSDEQLGKLVYNALETATGGFVLLYEWVLQWQKKMGPFLTSQEKEKIDKCKKQIQGTETEFNSLVKLSHPNVVRYLAMNLKEQDDSIVVDILVEHISGVSLAAHLSHSGPIPVHQLRRYTAQLLSGLDYLHSNSVVHKVLSASNVLVDAEGTVKITDYSISKRLADICKEDVFEQTRVRFSDNALPYKTGKKGDVWRLGLLLLSLSQGQECGEYPVTIPSDLPADFQDFLKKCVCLDDKERWSPQQLLKHSFINPQPKMPLVEQSPEDSEGQDYVETVIPSNRLPSAAFFSETQRQFSRYFIEFEELQLLGKGAFGAVIKVQNKLDGCCYAVKRIPINPASRQFRRIKGEVTLLSRLHHENIVRYYNAWIERHERPAGPGTPPPDSGPLAKDDRAARGQPASDTDGLDSVEAAAPPPILSSSVEWSTSGERSASARFPATGPGSSDDEDDDEDEHGGVFSQSFLPASDSESDIIFDNEDENSKSQNQDEDCNEKNGCHESEPSVTTEAVHYLYIQMEYCEKSTLRDTIDQGLYRDTVRLWRLFREILDGLAYIHEKGMIHRDLKPVNIFLDSDDHVKIGDFGLATDHLAFSADSKQDDQTGDLIKSDPSGHLTGMVGTALYVSPEVQGSTKSAYNQKVDLFSLGIIFFEMSYHPMVTASERIFVLNQLRDPTSPKFPEDFDDGEHAKQKSVISWLLNHDPAKRPTATELLKSELLPPPQMEESELHEVLHHTLTNVDGKAYRTMMAQIFSQRISPAIDYTYDSDILKGNFSIRTAKMQQHVCETIIRIFKRHGAVQLCTPLLLPRNRQIYEHNEAALFMDHSGMLVMLPFDLRIPFARYVARNNILNLKRYCIERVFRPRKLDRFHPKELLECAFDIVTSTTNSFLPTAEIIYTIYEIIQEFPALQERNYSIYLNHTMLLKAILLHCGIPEDKLSQVYIILYDAVTEKLTRREVEAKFCNLSLSSNSLCRLYKFIEQKGDLQDLMPTINSLIKQKTGIAQLVKYGLKDLEEVVGLLKKLGIKLQVLINLGLVYKVQQHNGIIFQFVAFIKRRQRAVPEILAAGGRYDLLIPQFRGPQALGPVPTAIGVSIAIDKISAAVLNMEESVTISSCDLLVVSVGQMSMSRAINLTQKLWTAGITAEIMYDWSQSQEELQEYCRHHEITYVALVSDKEGSHVKVKSFEKERQTEKRVLETELVDHVLQKLRTKVTDERNGREASDNLAVQNLKGSFSNASGLFEIHGATVVPIVSVLAPEKLSASTRRRYETQVQTRLQTSLANLHQKSSEIEILAVDLPKETILQFLSLEWDADEQAFNTTVKQLLSRLPKQRYLKLVCDEIYNIKVEKKVSVLFLYSYRDDYYRILF

SEQ ID NO: 2071 - protein, 585 aa, Homo sapiens
MKKQANKTASSGSSDKDSSAESSAPEEGEVSDSDSNSSSSSSDSDSSSEDEEFHDGYGEDLMGDEEDRARLEQMTEKEREQELFNRIEKREVLKRRFEIKKKLKTAKKKEKKEKKKKQEEEQEKKKLTQIQESQVTSHNKERRSKRDEKLDKKSQAMEELKAEREKRKNRTAELLAKKQPLKTSEVYSDDEEEEEDDKSSEKSDRSSRTSSSDEEEEKEEIPPKSQPVSLPEELNRVRLSRHKLERWCHMPFFAKTVTGCFVRIGIGNHNSKPVYRVAEITGVVETAKVYQLGGTRTNKGLQLRHGNDQRVFRLEFVSNQEFTESEFMKWKEAMFSAGMQLPTLDEINKKELSIKEALNYKFNDQDIEEIVKEKERFRKAPPNYAMKKTQLLKEKAMAEDLGDQDKAKQIQDQLNELEERAEALDRQRTKNISAISYINQRNREWNIVESEKALVAESHNMKNQQMDPFTRRQCKPTIVSNSRDPAVQAAILAQLNAKYGSGVLPDAPKEMSKGQGKDKDLNSKSASDLSEDLFKVHDFDVKIDLQVPSSESKALAITSKAPPAKDGAPRRSLNLEDYKKRRGLI

SEQ ID NO: 2072 - protein, 106 aa, Homo sapiens
MKMWNPVYYWGGGRWEGVGCKCLLIEEALIQAPITIPIPSSISHRLSPTSLVFCFSVGDTGPRRLGSPGCCGPCAPLYLPAPGPGACHQLQPQGALCQCLGALSLC

SEQ ID NO: 2073 - protein, 913 aa, Homo sapiens
MGSQTLQILRQGVWAALSGGWYYDPHQATFVNALHLYLWLFLLGLPFTLYMALPSTMIIVAVYCPVIAAVFIVLKMVNYRLHRALDAGEVVDRTANEFTDQRTKAEQGNCSTRRKDSNGPSDPGGGIEMSEFIREATPPVGCSSRNSYAGLDPSNQIGSGSSRLGTAATIKGDTDTAKTSDDISLSLGQSSSLCKEGSEEQDLAADRKLFRLVSNDSFISIQPSLSSCGQDLPRDFSDKVNLPSHNHHHHVDQSLSSACDTEVASLVPLHSHSYRKDHRPRGVPRTSSSAVAFPDTSLNDFPLYQQRRGLDPVSELESSKPLSGSKESLVENSGLSGEFQLAGDLKINTSQPPTKSGKSKPLKAEKSMDSLRSLSTRSSGSTESYCSGTDRDTNSTVSSYKSEQTSSTHIESILSEHEESPKAGTKSGRKKECCAGPEEKNSCASDKRTSSEKIAMEASTNSGVHEAKDPTPSDEMHNQRGLSTSASEEANKNPHANEFTSQGDRPPGNTAENKEEKSDKSAVSVDSKVRKDVGGKQKEGDVRPKSSSVIHRTASAHKSGRRRTGKKRASSFDSSRHRDYVCFRGVSGTKPHSAIFCHDEDSSDQSDLSRASSVQSAHQFSSDSSSSTTSHSCQSPEGRYSALKTKHTHKERGTDSEHTHKAHLVPEGTSKKRATRRTSSTNSAKTRARVLSLDSGTVACLNDSNRLMAPESIKPLTTSKSDLEAKEGEVLDELSLLGRASQLETVTRSRNSLPNQVAFPEGEEQDAVSGAAQASEEAVSFRRERSTFRRQAVRRRHNAGSNPTPPTLLIGSPLSLQDGQQGQQSTAQVKVQSRPPSQAAVLSASASLLGKFSSTLYETGGCDMSLVNFEPAARRASNICDTDSHVSSSTSVRFYPHDVVGFSLFLQHDKFSD

SEQ ID NO: 2074 - protein, 478 aa, Homo sapiens
MNSSLGGASLEGSQVYLGLSPRDLVLHFRHKVLILFKLILLEKKVLFYISPVNKLVGALMTVLSLFPGMIEHGLSDCSQYRPRKSMSEDGGLQESNPCADDFVSASTADVSHTNLGTIRKVMAGNHGEDAAMKTEEPLFQVEDSSKGQEPNDTNQYLKPPSRPSPDSSESDWETLDPSVLEDPNLKEREQLGSDQTNLFPKDSVPSESLPITVQPQANTGQVVLIPGLISGLEEDQYGMPLAIFTKGYLCLPYMALQQHHLLSDVTVRGFVAGATNILFRQQKHLSDAIVEVEEALIQIHDPELRKLLNPTTADLRFADYLVRHVTENRDDVFLDGTGWEGGDEWIRAQFAVYIHALLAATLQLVLFRIVNVAKKLETSWSQLAGMLYKQEKLLASQLEELFPVQRQLCLHGFPLSPLPPPKVSLSHQMRSLEQGVRGCYCFLRFKCPLSVCCSQAVTSHRSTAGDHMSNCLHGCCSK

SEQ ID NO: 2075 - protein, 2319 aa, Homo sapiens
MLTMSVTLSPLRSQDLDPMATDASPMAINMTPTVEQGEGEEAMKDMDSDQQYEKPPPLHTGADWKIVLHLPEIETWLRMTSERVRDLTYSVQQDSDSKHVDVHLVQLKDICEDISDHVEQIHALLETEFSLKLLSYSVNVIVDIHAVQLLWHQLRVSVLVLRERILQGLQDANGNYTRQTDILQAFSEETKEGRLDSLTEVDDSGQLTIKCSQNYLSLDCGITAFELSDYSPSEDLLSGLGDMTSSQVKTKPFDSWSYSEMEKEFPELIRSVGLLTVAADSISTNGSEAVTEEVSQVSLSVDDKGGCEEDNASAVEEQPGLTLGVSSSSGEALTNAAQPSSETVQQESSSSSHHDAKNQQPVPCENATPKRTIRDCFNYNEDSPTQPTLPKRGLFLKEETFKNDLKGNGGKRQMVDLKPEMSRSTPSLVDPPDRSKLCLVLQSSYPNSPSAASQSYECLHKVGNGNLENTVKFHIKEISSSLGRLNDCYKEKSRLKKPHKTSEEVPPCRTPKRGTGSGKQAKNTKSSAVPNGELSYTSKAIEGPQTNSASTSSLEPCNQRSWNAKLQLQSETSSSPAFTQSSESSVGSDNIMSPVPLLSKHKSKKGQASSPSHVTRNGEVVEAWYGSDEYLALPSHLKQTEVLALKLENLTKLLPQKPRGETIQNIDDWELSEMNSDSEIYPTYHVKKKHTRLGRVSPSSSSDIASSLGESIESGPLSDILSDEESSMPLAGMKKYADEKSERASSSEKNESHSATKSALIQKLMQDIQHQDNYEAIWEKIEGFVNKLDEFIQWLNEAMETTENWTPPKAEMDDLKLYLETHLSFKLNVDSHCALKEAVEEEGHQLLELIASHKAGLKDMLRMIASQWKELQRQIKRQHSWILRALDTIKAEILATDVSVEDEEGTGSPKAEVQLCYLEAQRDAVEQMSLKLYSEQYTSSSKRKEEFADMSKVHSVGSNGLLDFDSEYQELWDWLIDMESLVMDSHDLMMSEEQQQHLYKRYSVEMSIRHLKKTELLSKVEALKKGGVLLPNDLLEKVDSINEKWELLGKTLGEKIQDTMAGHSGSSPRDLLSPESGSLVRQLEVRIKELKGWLRDTELFIFNSCLRQEKEGTMNTEKQLQYFKSLCREIKQRRRGVASILRLCQHLLDDRETCNLNADHQPMQLIIVNLERRWEAIVMQAVQWQTRLQKKMGKESETLNVIDPGLMDLNGMSEDALEWDEMDISNKLISLNEESNDLDQELQPVIPSLKLGETSNEDPGYDEEADNHGGSQYASNITAPSSPHIYQVYSLHNVELYEDNHMPFLKNNPKVTGMTQPNVLTKSLSKDSSFSSTKSLPDLLGGSNLVKPCACHGGDMSQNSGSESGIVSEGDTETTTNSEMCLLNAVDGSPSNLETEHLDPQMGDAVNVLKQKFTDEGESIKLPNSSQSSISPVGCVNGKVGDLNSITKHTPDCLGEELQGKHDVFTFYDYSYLQGSKLKLPMIMKQSQSEKAHVEDPLLRGFYFDKKSCKSKHQTTELQPDVPPHERILASASHEMDRISYKSGNIEKTFTGMQNAKQLSLLSHSSSIESLSPGGDLFGLGIFKNGSDSLQRSTSLESWLTSYKSNEDLFSCHSSGDISVSSGSVGELSKRTLDLLNRLENIQSPSEQKIKRSVSDITLQSSSQKMSFTGQMSLDIASSINEDSAASLTELSSSDELSLCSEDIVLHKNKIPESNASFRKRLTRSVADESDVNVSMIVNVSCTSACTDDEDDSDLLSSSTLTLTEEELCIKDEDDDSSIATDDEIYEDCTLMSGLDYIKNELQTWIRPKLSLTRDKKRCNVSDEMKGSKDISSSEMTNPSDTLNIETLLNGSVKRVSENNGNGKNSSHTHELGTKRENKKTIFKVNKDPYVADMENGNIEGIPERQKGKPNVTSKVSENLGSHGKEISESEHCKCKALMDSLDDSNTAGKEFVSQDVRHLPKKCPNHHHFENQSTASTPTEKSFSELALETRFNNRQDSDALKSSDDAPSMAGKSAGCCLALEQNGTEENASISNISCCNCEPDVFHQKDAEDCSVHNFVKEIIDMASTALKSKSQPENEVAAPTSLTQIKEKVLEHSHRPIQLRKGDFYSYLSLSSHDSDCGEVTNYIEEKSSTPLPLDTTDSGLDDKEDIECFFEACVEGDSDGEEPCFSSAPPNESAVPSEAAMPLQATACSSEFSDSSLSADDADTVALSSPSSQERAEVGKEVNGLPQTSSGCAENLEFTPSKLDSEKESSGKPGESGMPEEHNAASAKSKVQDLSLKANQPTDKAALHPSPKTLTCEENLLNLHEKRHRNMHR

SEQ ID NO: 2076 - protein, 161 aa, Homo sapiens
MARAVFGVKCFSYSTSLIGLTFLPYIFTQNNAISESVPLPIQIIFYGIMGSFTVITPVLLHFITKGYVIRLYHEATTDTYKAITYNAMLAETSTVFHQNDVKIPDAKHVFTTFYAKTKSLLVNPVLFPNREDYIHLMGYDKEEFILYMEETSEEKRHKDDK

SEQ ID NO: 2077 - protein, 314 aa, Homo sapiens
MEDKRNIQIIEWEHLDKKKFYVFGVAMTMMIRVSVYPFTLIRTRLQVQKGKSLYHGTFDAFIKILRADGITGLYRGFLVNTFTLISGQCYVTTYELTRKFVADYSQSNTVKSLVAGGSASLVAQSITVPIDVVSQHLMMQRKGEKMGRFQVRGNPEGQGVVAFGQTKDIIRQILQADGLRGFYRGYVASLLTYIPNSAVWWPFYHFYAEQLSYLCPKECPHIVFQAVSGPLAAATASILTNPMDVIRTRVQVEGKNSIILTFRQLMAEEGPWGLMKGLSARIISATPSTIVIVVGYESLKKLSLRPELVDSRHW

SEQ ID NO: 2078 - protein, 567 aa, Homo sapiens
MSGTKPDILWAPHHVDRFVVCDSELSLYHVESTVNSELKAGSLRLSEDSAATLLSINSDTPYMKCVAWYLNYDPECLLAVGQANGRVVLTSLGQDHNSKFKDLIGKEFVPKHARQCNTLAWNPLDSNWLAAGLDKHRADFSVLIWDICSKYTPDIVPMEKVKLSAGETETTLLVTKPLYELGQNDACLSLCWLPRDQKLLLAGMHRNLAIFDLRNTSQKMFVNTKAVQGVTVDPYFHDRVASFYEGQVAIWDLRKFEKPVLTLTEQPKPLTKVAWCPTRTGLLATLTRDSNIIRLYDMQHTPTPIGDETEPTIIERSVQPCDNYIASFAWHPTSQNRMIVVTPNRTMSDFTVFERISLAWSPITSLMWACGRHLYECTEEENDNSLEKDIATKMRLRALSRYGLDTEQVWRNHILAGNEDPQLKSLWYTLHYMKQYTEDMDQKSPGNKGSLVYAGIKSIVKSSLGMVESSRHNWSGLDKQSDIQNLNEERILALQLCGWIKKGTDVDVGPFLNSLVQEGEWERAAAVALFNLDIRRAIQILNEGASSEKGRRSESQCGSNGFIGLYG

SEQ ID NO: 2079 - protein, 664 aa, Homo sapiens
METPSQRRATRSGAQASSTPLSPTRITRLQEKEDLQELNDRLAVYIDRVRSLETENAGLRLRITESEEVVSREVSGIKAAYEAELGDARKTLDSVAKERARLQLELSKVREEFKELKARNTKKEGDLIAAQARLKDLEALLNSKEAALSTALSEKRTLEGELHDLRGQVAKLEAALGEAKKQLQDEMLRRVDAENRLQTMKEELDFQKNIYSEELRETKRRHETRLVEIDNGKQREFESRLADALQELRAQHEDQVEQYKKELEKTYSAKLDNARQSAERNSNLVGAAHEELQQSRIRIDSLSAQLSQLQKQLAAKEAKLRDLEDSLARERDTSRRLLAEKEREMAEMRARMQQQLDEYQELLDIKLALDMEIHAYRKLLEGEEERLRLSPSPTSQRSRGRASSHSSQTQGGGSVTKKRKLESTESRSSFSQHARTSGRVAVEEVDEEGKFVRLRNKSNEDQSMGNWQIKRQNGDDPLLTYRFPPKFTLKAGQVVTIWAAGAGATHSPPTDLVWKAQNTWGCGNSLRTALINSTGEEVAMRKLVRSVTVVEDDEDEDGDDLLHHHHGSHCSSSGDPAEYNLRSRTVLCGTCGQPADKASASGSGAQVGGPISSGSSASSVTVTRSYRSVGGSGGGSFGDNLVTRSYLLGNSSPRTQSPQNCSIM

SEQ ID NO: 2080 - protein, 106 aa, Homo sapiens
MKMTKTAKKRKTKAALRVEMRATTQETQLQTCRKPVKGPNYHNECCILRETTRRLYVWLSNILGFDMNQHIVLVVIDRTPVCMYIIHIPLCCVSGGKDILAFFKSY

SEQ ID NO: 2081 - protein, 806 aa, Homo sapiens
MRNRTLSVESLIDEEVIYSELMSDFEMDEKDFAADSWSLAVDSSFLQQHKKEVMKQQDVIYELIQTELHHVRTLKIMTRLFRTGMLEELHLEPGVVQGLFPCVDELSDIHTRFLSQLLERRRQALCPGSTRNFVIHRLGDLLISQFSGPSAEQMCKTYSEFCSRHSKALKLYKELYARDKRFQQFIRKVTRPAVLKRHGVQECILLVTQRITKYPLLISRILQHSHGIEEERQDLTTALGLVKELLSNVDEGIYQLEKGARLQEIYNRMDPRAQTPVPGKGPFGREELLRRKLIHDGCLLWKTATGRFKDVLVLLMTDVLVFLQEKDQKYIFPTLDKPSVVSLQNLIVRDIANQEKGMFLISAAPPEMYEVHTASRDDRSTWIRVIQQSVRTCPSREDFPLIETEDEAYLRRIKMELQQKDRALVELLREKVGLFAEMTHFQAEEDGGSGMALPTLPRGLFRSESLESPRGERLLQDAIREVEGLKDLLVGPGVELLLTPREPALPLEPDSGGNTSPGVTANGEARTFNGSIELCRADSDSSQRDRNGNQLRSPQEEALQRLVNLYGLLHGLQAAVAQQDTLMEARFPEGPERREKLCRANSRDGEAGRAGAAPVAPEKQATELALLQRQHALLQEELRRCRRLGEERATEAGSLEARLRESEQARALLEREAEEARRQLAALGQTEPLPAEAPWARRPVDPRRRSLPAGDALYLSFNPPQPSRGTDRLDLPVTTRSVHRNFEDRERQELGSPEERLQDSSDPDTGSEEEGSSRLSPPHSPRDFTRMQDIPEETESRDGEAVASES

SEQ ID NO: 2082 - protein, 531 aa, Homo sapiens
MSKPHSEAGTAFIQTQQLHAAMADTFLEHMCRLDIDSPPITARNTGIICTIGPASRSVETLKEMIKSGMNVARLNFSHGTHEYHAETIKNVRTATESFASDPILYRPVAVALDTKGPEIRTGLIKGSGTAEVELKKGATLKITLDNAYMEKCDENILWLDYKNICKVVEVGSKIYVDDGLISLQVKQKGADFLVTEVENGGSLGSKKGVNLPGAAVDLPAVSEKDIQDLKFGVEQDVDMVFASFIRKASDVHEVRKVLGEKGKNIKIISKIENHEGVRRFDEILEASDGIMVARGDLGIEIPAEKVFLAQKMMIGRCNRAGKPVICATQMLESMIKKPRPTRAEGSDVANAVLDGADCIMLSGETAKGDYPLEAVRMQHLIAREAEAAIYHLQLFEELRRLAPITSDPTEATAVGAVEASFKCCSGAIIVLTKSGRSAHQVARYRPRAPIIAVTRNPQTARQAHLYRGIFPVLCKDPVQEAWAEDVDLRVNFAMNVGKARGFFKKGDVVIVLTGWRPGSGFTNTMRVVPVP

SEQ ID NO: 2083 - protein, 251 aa, Homo sapiens [sequence omitted]

SEQ ID NO: 2084 - protein, 411 aa, Homo sapiens
MNCCIGLGEKARGSHRASYPSLSALFTEASILGFGSFAVKAQWTEDCRKSTYPPSGPTYRGAVPWYTINLDLPPYKRWHELMLDKAPMLKVIVNSLKNMINTFVPSGKVMQVVDEKLPGLLGNFPGPFEEEMKGIAAVTDIPLGEIISFNIFYELFTICTSIVAEDKKGHLIHGRNMDFGVFLGWNINNDTWVITEQLKPLTVNLDFQRNNKTVFKASSFAGYVGMLTGFKPGLFSLTLNERFSINGGYLGILEWILGKKDAMWIGFLTRTVLENSTSYEEAKNLLTKTKILAPAYFILGGNQSGEGCVITRDRKESLDVYELDAKQGRWYVVQTNYDRWKHPFFLDDRRTPAKMCLNRTSQENISFETMYDVLSTKPVLNKLTVYTTLIDVTKGQFETYLRDCPDPCIGW

SEQ ID NO: 2085 - protein, 886 aa, Homo sapiens
MGQKLKQRLRLDVGREICRQYPLFCFLLLCLSAASLLLNRYIHILMIFWSFVAGVVTFYCSLGPDSLLPNIFFTIKYKPKQLGLQELFPQGHSCAVCGKVKCKRHRPSLLLENYQPWLDLKISSKVDASLSEVDIPSIITKKLLKAAMKHIEVIVKARQKVKNTEFLQQAALEEYGPELHVALRSRRDELHYLRKLTELLFPYILPPKATDCRSLTLLIREILSGSVFLPSLDFLADPDTVNHLLIIFIDDSPPEKATEPASPLVPFLQKFAEPRNKKPSVLKLELKQIREQQDLLFRFMNFLKQEGAVHVLQFCLTVEEFNDRILRPELSNDEMLSLHEELQKIYKTYCLDESIDKIRFDPFIVEEIQRIAEGPYIDVVKLQTMRCLFEAYEHVLSLLENVFTPMFCHSDEYFRQLLRGAESPTRNSKLNRNTQKRGESFGISRIGSKIKGVFKSTTMEGAMLPNYGVAEGEDDFIEEGIVVMEDDSPVEAVSTPNTPRNLAAWKISIPYVDFFEDPSSERKEKKERIPVFCIDVERNDRRAVGHEPEHWSVYRRYLEFYVLESKLTEFHGAFPDAQLPSKRIIGPKNYEFLKSKREEFQEYLQKLLQHPELSNSQLLADFLSPNGGETQFLDKILPDVNLGKIIKSVPGKLMKEKGQHLEPFIMNFINSCESPKPKPSRPELTILSPTSENNKKLFNDLFKNNANRAENTERKQNQNYFMEVMTVEGVYDYLMYVGRVVFQVPDWLHHLLMGTRILFKNTLEMYTDYYLQCKLEQLFQEHRLVSLITLLRDAIFCENTEPRSLQDKQKGAKQTFEEMMNYIPDLLVKCIGEETKYESIRLLFDGLQQPVLNKQLTYVLLDIVIQELFPELNKVQKEVTSVTSWM

SEQ ID NO: 2086 - protein, 102 aa, Homo sapiens [sequence omitted]

SEQ ID NO: 2087 - protein, 289 aa, Homo sapiens
MENGYTYEDYKNTAEWLLSHTKHRPQVAIICGSGLGGLTDKLTQAQIFDYGEIPNFPRSTVPGHAGRLVFGFLNGRACVMMQGRFHMYEGYPLWKVTFPVRVFHLLGVDTLVVTNAAGGLNPKFEVGDIMLIRDHINLPGFSGQNPLRGPNDERFGDRFPAMSDAYDRTMRQRALSTWKQMGEQRELQEGTYVMVAGPSFETVAECRVLQKLGADAVGMSTVPEVIVARHCGLRVFGFSLITNKVIMDYESLEKANHEEVLAAGKQAAQKLEQFVSILMASIPLPDKAS

SEQ ID NO: 2088 - protein, 422 aa, Homo sapiens
MAAQQNPLQQPRGRRGLGQRGSSRQGSPGSVSKQKPCDLPLRLLVPTQFVGAIIGKEGATIRNITKQTQSKIDVHRKENAGAAEKSITILSTPEGTSAACKSILEIMHKEAQDIKFTEEIPLKILAHNNFVGRLIGKEGRNLKKIEQDTDTKITISPLQELTLYNPERTITVKGNVETCAKAEEEIMKKIRESYENDIASMNLQAHLIPGLNLNALGLFPPTSGMPPPTSGPPSAMTPPYPQFEQSETETVHLFIPALSVGAIIGKQGQHIKQLSRFAGASIKIAPAEAPDAKVRMVIITGPPEAQFKAQGRIYGKIKEENFVSPKEEVKLEAHIRVPSFAAGRVIGKGGKTVNELQNLSSAEVVVPRDQTPDENDQVVVKITGHFYACQVAQRKIQEILTQVKQHQQQKALQSGPPQSRRK

SEQ ID NO: 2089 - protein, 409 aa, Homo sapiens [sequence omitted]

SEQ ID NO: 2090 - protein, 509 aa, Homo sapiens
MQSWSRVYCSLAKRGHFNRISHGLQGLSAVPLRTYADQPIDADVTVIGSGPGGYVAAIKAAQLGFKTVCIEKNETLGGTCLNVGCIPSKALLNNSHYYHMAHGKDFASRGIEMSEVRLNLDKMMEQKSTAVKALTGGIAHLFKQNKVVHVNGYGKITGKNQVTATKADGGTQVIDTKNILIATGSEVTPFPGITIDEDTIVSSTGALSLKKVPEKMVVIGAGVIGVELGSVWQRLGADVTAVEFLGHVGGVGIDMEISKNFQRILQKQGFKFKLNTKVTGATKKSDGKIDVSIEAASGGKAEVITCDVLLVCIGRRPFTKNLGLEELGIELDPRGRIPVNTRFQTKIPNIYAIGDVVAGPMLAHKAEDEGIICVEGMAGGAVHIDYNCVPSVIYTHPEVAWVGKSEEQLKEEGIEYKVGKFPFAANSRAKTNADTDGMVKILGQKSTDRVLGAHILGPGAGEMVNEAALALEYGASCEDIARVCHAHPTLSEAFREANLAASFGKSINF

SEQ ID NO: 2091 - protein, 306 aa, Homo sapiens
MDSHVSERVKNKVYQLARQYSLRIKSNKPVMARPPLQWEKVAPERDGKSPTVPCLQEEAGEPLGGKGKRKPVLSLFDYEQLMAQEHSPPKPSSAGEMSPQRFFFNPSAVSQRTTSPGGRPSARSPLSPTETFSWPDVRELCSKYASRDEARRAGGGRPRGPPVNRSHSVPENMVEPPLSGRVGRCRSLSTKRGRGGGEAAQSPGPLPQSKPDGGETLYVTADLTLEDNRRVIVMEKGPLPSPTAGLEESSGQGPSSPVALLGQVQDFQQSAECQPKEEGSRDPADPSQQGRVRNLREKFQALNSVG

SEQ ID NO: 2092 - protein, 1470 aa, Homo sapiens
MIYLGDLLKAETATPVKNVTAMNIPSLVTLTWLFTWPRGTSAEACVMTVSTTPWGATVSSASRFTTSTQRGTSEILISVNVCTCDPAGSQNEGICDSYTDFSTGLIAGQCRCKLNVEGEHCDVCKEGFYDLSSEDPFGCKSCACNPLGTIPGGNPCDSETGHCYCKRLVTGQHCDQCLPEHWGLSNDLDGCRPCDCDLGGALNNSCFAESGQCSCRPHMIGRQCNEVEPGYYFATLDHYLYEAEEANLGPGVSIVERQYIQDRIPSWTGAGFVRVPEGAYLEFFIDNIPYSMEYDILIRYEPQLPDHWEKAVITVQRPGRIPTSSRCGNTIPDDDNQVVSLSPGSRYVVLPRPVCFEKGTNYTVRLELPQYTSSDSDVESPYTLIDSLVLMPYCKSLDIFTVGGSGDGVVTNSAWETFQRYRCLENSRSVVKTPMTDVCRNIIFSISALLHQTGLACECDPQGSLSSVCDPNGGQCQCRPNVVGRTCNRCAPGTFGFGPSGCKPCECHLQGSVNAFCNPVTGQCHCFQGVYARQCDRCLPGHWGFPSCQPCQCNGHADDCDPVTGECLNCQDYTMGHNCERCLAGYYGDPIIGSGDHCRPCPCPDGPDSGRQFARSCYQDPVTLQLACVCDPGYIGSRCDDCASGYFGNPSEVGGSCQPCQCHNNIDTTDPEACDKETGRCLKCLYHTEGEHCQFCRFGYYGDALQQDCRKCVCNYLGTVQEHCNGSDCQCDKATGQCLCLPNVIGQNCDRCAPNTWQLASGTGCDPCNCNAAHSFGPSCNEFTGQCQCMPGFGGRTCSECQELFWGDPDVECRACDCDPRGIETPQCDQSTGQCVCVEGVEGPRCDKCTRGYSGVFPDCTPCHQCFALWDVIIAELTNRTHRFLEKAKALKISGVIGPYRETVDSVERKVSEIKDILAQSPAAEPLKNIGNLFEEAEKLIKDVTEMMAQVEVKLSDTTSQSNSTAKELDSLQTEAESLDNTVKELAEQLEFIKNSDIRGALDSITKYFQMSLEAEERVNASTTEPNSTVEQSALMRDRVEDVMMERESQFKEKQEEQARLLDELAGKLQSLDLSAAAEMTCGTPPGASCSETECGGPNCRTDEGERKCGGPGCGGLVTVAHNAWQKAMDLDQDVLSALAEVEQLSKMVSEAKLRADEAKQSAEDILLKTNATKEKMDKSNEELRNLIKQIRNFLTQDSADLDSIEAVANEVLKMEMPSTPQQLQNLTEDIRERVESLSQVEVILQHSAADIARAEMLLEEAKRASKSATDVKVTADMVKEALEEAEKAQVAAEKAIKQADEDIQGTQNLLTSIESETAASEETLFNASQRISELERNVEELKRKAAQNSGEAEYIEKVVYTVKQSAEDVKKTLDGELDEKYKKVENLIAKKTEESADARRKAEMLQNEAKTLLAQANSKLQLLKDLERKYEDNQRYLEDKAQELARLEGEVRSLLKDISQKVAVYSTCL

SEQ ID NO: 2093 - protein, 2106 aa, Homo sapiens
MTSATEFENVGNQPPYSRINARWDAPDDELDNDNSSARLFERSRIKALADEREVVQKKTFTKWVNSHLARVSCRITDLYKDLRDGRMLIKLLEVLSGEMLPKPTKGKMRIHCLENVDKALQFLKEQRVHLENMGSHDIVDGNHRLVLGLIWTIILRFQIQDIVVQTQEGRETRSAKDALLLWCQMKTAGYPHVNVTNFTSSWKDGLAFNALIHKHRPDLIDFDKLKDSNARHNLEHAFNVAERQLGIIPLLDPEDVFTENPDEKSIITYVVAFYHYFSKMKVLAVEGKRVGKVIDHAIETEKMIEKYSGLASDLLTWIEQTITVLNSRKFANSLTGVQQQLQAFSTYRTVEKPPKFQEKGNLEVLLFTIQSRMRANNQKVYTPHDGKLVSDINRAWESLEEAEYRRELALRNELIRQEKLEQLARRFDRKAAMRETWLSENQRLVAQDNFGYDLAAVEAAKKKHEAIETDTAAYEERVRALEDLAQELEKENYHDQKRITARKDNILRLWSYLQELLQSRRQRLETTLALQKLFQDMLHSIDWMDEIKAHLLSAEFGKHLLEVEDLLQKHKLMEADIAIQGDKVKAITAATLKFTEGKGYQPCDPQVIQDRISHLEQCFEELSNMAAGRKAQLEQSKRLWKFFWEMDEAESWIKEKEQIYSSLDYGKDLTSVLILQRKHKAFEDELRGLDAHLEQIFQEAHGMVARKQFGHPQIEARIKEVSAQWDQLKDLAAFCKKNLQDAENFFQFQGDADDLKAWLQDAHRLLSGEDVGQDEGATRALGKKHKDFLEELEESRGVMEHLEQQAQGFPEEFRDSPDVTHRLQALRELYQQVVAQADLRQQRLQEALDLYTVFGETDACELWMGEKEKWLAEMEMPDTLEDLEVVQHRFDILDQEMKTLMTQIDGVNLAANSLVESGHPRSREVKQYQDHLNTRWQAFQTLVSERREAVDSALRVHNYCVDCEETSKWITDKTKVVESTKDLGRDLAGIIAIQRKLSGLERDVAAIQARVDALERESQQLMDSHPEQKEDIGQRQKHLEELWQGLQQSLQGQEDLLGEVSQLQAFLQDLDDFQAWLSITQKAVASEDMPESLPEAEQLLQQHAGIKDEIDGHQDSYQRVKESGEKVIQGQTDPEYLLLGQRLEGLDTGWNALGRMWESRSHTLAQCLGFQEFQKDAKQAEAILSNQEYTLAHLEPPDSLEAAEAGIRKFEDFLGSMENNRDKVLSPVDSGNKLVAEGNLYSDKIKEKVQLIEDRHRKNNEKAQEASVLLRDNLELQNFLQNCQELTLWINDKLLTSQDVSYDEARNLHNKWLKHQAFVAELASHEGWLENIDAEGKQLMDEKPQFTALVSQKLEALHRLWDELQATTKEKTQHLSAARSSDLRLQTHADLNKWISAMEDQLRSDDPGKDLTSVNRMLAKLKRVEDQVNVRKEELGELFAQVPSMGEEGGDADLSIEKRFLDLLEPLGRRKKQLESSRAKLQISRDLEDETLWVEERLPLAQSADYGTNLQTVQLFMKKNQTLQNEILGHTPRVEDVLQRGQQLVEAAEIDCQDLEERLGHLQSSWDRLREAAAGRLQRLRDANEAQQYYLDADEAEAWIGEQELYVISDEIPKDEEGAIVMLKRHLRQQRAVEDYGRNIKQLASRAQGLLSAGHPEGEQIIRLQGQVDKHYAGLKDVAEERKRKLENMYHLFQLKRETDDLEQWISEKELVASSPEMGQDFDHVTLLRDKFRDFARETGAIGQERVDNVNAFIERLIDAGHSEAATIAEWKDGLNEMWADLLELIDTRMQLLAASYDLHRYFYTGAEILGLIDEKHRELPEDVGLDASTAESFHRVHTAFERELHLLGVQVQQFQDVATRLQTAYAGEKAEAIQNKEQEVSAAWQALLDACAGRRTQLVDTADKFRFFSMARDLLSWMESIIRQIETQERPRDVSSVELLMKYHQGINAEIETRSKNFSACLELGESLLQRQHQASEEIREKLQQVMSRRKEMNEKWEARWERLRMLLEVCQFSRDASVAEAWLIAQEPYLASGDFGHTVDSVEKLIKRHEAFEKSTASWAERFAALEKPTTASRGGRRDSRGGSSFPPCGHRENVPGQSLVSFV

SEQ ID NO: 2094 - protein, 581 aa, Homo sapiens
  VARIANT 67, 68, 69, 70, 71, 72: Xaa = Any Amino Acid
MSSSKKSKEKEKEKDKIKEKEKDSKDKEKDKKTVNGHTFSSIPVVGPISCSQCMKPFTNKDAYTCAXXXXXXAFVHKGCRESLASCAKVKMKQPKGSLQAHDTSSLPTVIMRNKPSQPKERPRSAVLLVDETATTPIFANRRSQQSVSLSKSVSIQNITGVGNDENMSNTWKFLSHSTDSLNKISKVNESTESLTDEGTDMNEGQLLGDFEIESKQLEAESWSRIIDSKFLKQQKKDVVKRQEVIYELMQTEFHHVRTLKIMSGVYSQGMMADLLFEQQMVEKLFPCLDELISIHSQFFQRILERKKESLVDKSEKNFLIKRIGDVLVNQFSGENAERLKKTYGKFCGQHNQSVNYFKDLYAKDKRFQAFVKKKMSSSVVRRLGIPECILLVTQRITKYPVLFQRILQCTKDNEVEQEDLAQSLSLVKDVIGAVDSKVASYEKKVRLNEIYTKTDSKSIMRMKSGQMFAKEDLKRKKLVRDGSVFLKNAAGRLKEVQAVLLTDILVFLQEKDQKYIFASLDQKSTVISLKKLIVREVAHEEKGLFLISMGMTDPEMVEVHASSKEERNSWIQIIQDTINTL

SEQ ID NO: 2095 - protein, 448 aa, Homo sapiens
MLWLALGPFPAMENQVLVIRIKIPNSGAVDWTVHSGPQLLFRDVLDVIGQVLPEATTTAFEYEDEDGDRITVRSDEEMKAMLSYYYSTVMEQQVNGQLIEPLQIFPRACKPPGERNIHGLKVNTRAGPSQHSSPAVSDSLPSNSLKKSSAELKKILANGQMNEQDIRYRDTLGHGNGGTVYKAYHVPSGKILAVKVILLDITLELQKQIMSELEILYKCDSSYIIGFYGAFFVENRISICTEFMDGGSLDVYRKMPEHVLGRIAVAVVKGLTYLWSLKILHRDVKPSNMLVNTRGQVKLCDFGVSTQLVNSIAKTYVGTNAYMAPERISGEQYGIHSDVWSLGISFMELALGRFPYPQIQKNQGSLMPLQLLQCIVDEDSPVLPVGEFSEPFVHFITQCMRKQPKERPAPEELMGHPFIVQFNDGNAAVVSMWVCRALEERRSQQGPP

SEQ ID NO: 2096 - protein, 715 aa, Homo sapiens
MNFLLKAEVQKLQALANEQAAAAHELEKMQQSVYVKDDKIRLLEEQLQHEISNKMEEFKILNDQNKALKSEVQKLQTLVSEQPNKDVVEQMEKCIQEKDEKLKTVEELLETGLIQVATKEEELNAIRTENSSLTKEVQDLKAKQNDQVSFASLVEELKKVIHEKDGKIKSVEELLEAELLKVANKEKTVQDLKQEIKALKEEIGNVQLEKAQQLSITSKVQELQNLLKGKEEQMNTMKAVLEEKEKDLANTGKWLQDLQEENESLKAHVQEVAQHNLKEASSASQFEELEIVLKEKENELKRLEAMLKERESDLSSKTQLLQDVQDENKLFKSQIEQLKQQNYQQASSFPPHEELLKVISEREKEISGLWNELDSLKDAVEHQRKKNNDLREKNWEAMEALASTEKMLQDKVNKTSKERQQQVEAVELEAKEVLKKLFPKVSVPSNLSYGEWLHGFEKKAKECMAGTSGSEEVKVLEHKLKEADEMHTLLQLECEKYKSVLAETEGILQKLQRSVEQEENKWKVKVDESHKTIKQMQSSFTSSEQELERLRSENKDIENLRREREHLEMELEKAEMERSTYVTEVRELKDLLTELQKKLDDSYSEAVRQNEELNLLKAQLNETLTKLRTEQNERQKVAGDLHKAQQSLELIQSKIVKAAGDTTVIENSDVSPETESSEKETMSVSLNQTVTQLQQLLQAVNQQLTKEKEHYQVLE

SEQ ID NO: 2097 - protein, 1782 aa, Homo sapiens
MGAGSSTEQRSPEQPPEGSSTPAEPEPSGGGPSAEAAPDTTADPAIAASDPATKLLQKNGQLSTINGVAEQDELSLQEGDLNGQKGALNGQGALNSQEEEEVIVTEVGQRDSEDVSKRDSDKEMATKSAVVHDITDDGQEETPEIIEQIPSSESNLEELTQPTESQANDIGFKKVFKFVGFKFTVKKDKTEKPDTVQLLTVKKDEGEGAAGAGDHKDPSLGAGEAASKESEPKQSTEKPEETLKREQSHAEISPPAESGQAVEECKEEGEEKQEKEPSKSAESPTSPVTSETGSTFKKFFTQGWAGWRKKTSFRKPKEDEVEASEKKKEQEPEKVDTEEDGKAEVASEKLTASEQAHPQEPAESAHEPRLSAEYEKVELPSEEQVSGSQGPSEEKPAPLATEVFDEKIEVHQEEVVAEVHVSTVEERTEEQKTEVEETAGSVPAEELVEMDAEPQEAEPAKELVKLKETCVSGEDPTQGADLSPDEKVLSKPPEGVVSEVEMLSSQERMKVQGSPLKKLFTSTGLKKLSGKKQKGKRGGGDEESGEHTQVPADSPDSQEEQKGESSASSPEEPEEITCLEKGLAEVQQDGEAEEGATSDGEKKREGVTPWASFKKMVTPKKRVRRPSESDKEDELDKVKSATLSSTESTASEMQEEMKGSVEEPKPEEPKRKVDTSVSWEALICVGSSKKRARRGSSSDEEGGPKAMGGDHQKADEAGKDKETGTDGILAGSQEHDPGQGSSSPEQAGSPTEGEGVSTWESFKRLVTPRKKSKSKLEEKSEDSIAGSGVEHSTPDTEPGKEESWVSIKKFIPGRRKKRPDGKQEQAPVEDAGPTGANEDDSDVPAVVPLSEYDAVEREKMEAQQAQKSAEQPEQKAATEVSKELSESQVHMMAAAVADGTRAATIIEERSPSWISASVTEPLEQVEAEAALLTEEVLEREVIAEEEPPTVTEPLPENREARGDTVVSEAELTPEAVTAAETAGPLGAEEGTEASAAEETTEMVSAVSQLTDSPDTTEEATPVQEVEGGVPDIEEQERRTQEVLQAVAEKVKEESQLPGTGGPEDVLQPVQRAEAERPEEQAEASGLKKETDVVLKVDAQEAKTEPFTQGKVVGQTTPESFEKAPQVTESIESSELVTTCQAETLAGVKSQEMVMEQAIPPDSVETPTDSETDGSTPVADFDAPGTTQKDEIVEIHEENEVASGTQSGGTEAEAVPAQKERPPAPSSFVFQEETKEQSKMEDTLEHTDKEVSVETVSILSKTEGTQEADQYADEKTKDVPFFEGLEGSIDTGITVSREKVTEVALKGEGTEEAECKKDDALELQSHAKSPPSPVEREMVVQVEREKTEAEPTHVNEEKLEHETAVTVSEEVSKQLLQTVNVPIIDGAKEVSSLEGSPPPCLGQEEAVCTKIQVQSSEASFTLTAAAEEEKVLGETANILETGETLEPAGAHLVLEEKSSEKNEDFAAHPGEDAVPTGPDCQAKSTPVIVSATTKKGLSSDLEGEKTTSLKWKSDEVDEQVACQEVKVSVAIEDLEPENGILELETKSSKLVQNIIQTAVDQFVRTEETATEMLTSELQTQAHVIKADSQDAGQETEKEGEEPQASAQDETPITSAKEESESTAVGQAHSDISKDMSEASEKTMTVEVEGSTVNDQQLEEVVLPSEEEGGGAGTKSVPEDDGHALLAERIEKSLVEPKEDEKGDDVDDPENQNSALADTDASGGLTKESPDTNGPKQKEKEDAQEVELQEGKVHSESDKAITPQAQEELQKQERESAKSELTES

SEQ ID NO: 2098 - protein, 159 aa, Homo sapiens
MIKFFLMVNKQGQTRLSKYYEHVDINKRTLLETEVIKSCLSRSNEQCSFIEYKDFKLIYRQYAALFIVVGVNDTENEMAIYEFIHNFVEVLDEYFSRVSELDVSFFNTVFHSTWQMHSGPYQEPIDELPKICSALEPQQTCFSPDSSSFKGAASTTPIY

SEQ ID NO: 2099 - protein, 489 aa, Homo sapiens
MYSAMSPFSKATLDTSKLYVSSSFTNKIPDEGDTTPEKPEDPSALSKQSSEVSMREESDIDQNQSDDGDTETSPTKSPTTPKSVKNKNSSEFPLFSYNNGVVMTSCRELDNNRSALSAASAFAIATAGANEGTPNKEKYRRMSLASAGFPPDQRNGDKEFVIRRAATNRVLNVLRHWVSKHSQDFETNDELKCKVIGFLEEVMHDPELLTQERKAAANIIRTLTQEDPGDNQITLEEITQMAEGVKAEPFENHSALEIAEQLTLLDHLVFKKIPYEEFFGQGWMKLEKNERTPYIMKTTKHFNDISNLIASEIIRNEDINARVSAIEKWVAVADICRCLHNYNAVLEITSSMNRSAIFRLKKTWLKVSKQTKALIDKLQKLVSSEGRFKNLREALKNCDPPCVPYLGMYLTDLAFIEEGTPNYTEDGLVNFSKMRMISHIIREIRQFQQTAYKIEHQAKVTQYLLDQSFVMDEESLYESSLRIEPKLPT

SEQ ID NO: 2100 - protein, 476 aa, Homo sapiens
MGSKMNLIEHSHLPTTDEFSFSENLFGVLTEQVAGPLGQNLEVEPYSQYSNVQFPQVQPQISSSSYYSNLGFYPQQPEEWYSPGIYELRRMPAETLYQGETEVAEMPVTKKPRMGASAGRIKGDELCVVCGDRASGYHYNALTCEGCKGFFRRSITKNAVYKCKNGGNCVMDMYMRRKCQECRLRKCKEMGMLAECMYTGLLTEIQCKSKRLRKNVKQHADQTVNEDSEGRDLRQVTSTTKSCREKTELTPDQQTLLHFIMDSYNKQRMPQEITNKILKEEFSAEENFLILTEMATNHVQVLVEFTKKLPGFQTLDHEDQIALLKGSAVEAMFLRSAEIFNKKLPSGHSDLLEERIRNSGISDEYITPMFSFYKSIGELKMTQEEYALLTAIVILSPDRQYIKDREAVEKLQEPLLDVLQKLCKIHQPENPQHFACLLGRLTELRTFNHHHAEMLMSWRVNDHKFTPLLCEIWDVQ

SEQ ID NO: 2101 - protein, 97 aa, Homo sapiens
MTKGTSLFGKRRNKTHTLCCRRGSKAYHLQKSTCGKCGYAAKRKRKYNWSAKAKRQNTTGTGGMRHLKIVYHRFRHGFYEGTILKPKRAAVAASSSS

SEQ ID NO: 2102 - protein, 532 aa, Homo sapiens
MNKSTCLMAAETPSKRWRLHCLAFSQRFVRAGPACSSREACSSPRAGWNPAGFRLPGRWSPFVALHLVCQIREALKLRSGHRTPSGAGSSMQPPPSLCGRALVALVLACGLSRIWGEERGFPPDRATPLLQTAEIMTPPTKTLWPKGSNASLARSLAPAEVPKGDRTAGSPPRTISPPPCQGPIEIKETFKYINTVVSCLVFVLGIIGNSTLLRIIYKNKCMRNGPNILIASLALGDLLHIVIDIPINVYKLLAEDWPFGAEMCKLVPFIQKASVGITVLSLCALSIDRYRAVASWSRIKGIGVPKWTAVEIVLIWVVSVVLAVPEAIGFDIITMDYKGSYLRICLLHPVQKTAFMQFYKTAKDWWLFSFYFCLPLAITAFFYTLMTCEMLRKKSGMQIALNDHLKQRREVAKTVFCLVLVFALCWLPLHLSRILKLTLYNQNDPNRCELLSFLLVLDYIGINMASLNSCINPIALYLVSKRFKNCFKSCLCCWCQSFEEKQSLEEKQSCLKFKANDHGYDNFRSSNKYSSS

SEQ ID NO: 2103 - protein, 4640 aa, Homo sapiens
MPVPDGSVAAAGLGLGLPAADSRGHYQLLLSGRALADRYRRIYTAALNDRDQGGGSAGHPASRNKKILNKKKLKRKQKSKSKVKTRSKSENLENTVIIPDIKLHSNPSAFNIYCNVRHCVLEWQKKEISLAAASKNSVQSGESDSDEEEESKEPPIKLPKIIEVGLCEVFELIKETRFSHPSLCLRSLQALLNVLQGQQPEGLQSEPPEVLESLFQLLLEITVRSTGMNDSTGQSLTALSCACLFSLVASWGETGRTLQAISAILTNNGSHACQTIQVPTILNSLQRSVQAVLVGKIQIQDWFSNGIKKAALMHKWPLKEISVDEDDQCLLQNDGFFLYLLCKDGLYKIGSGYSGTVRGHIYNSTSRIRNRKEKKSWLGYAQGYLLYRDVNNHSMTAIRISPETLEQDGTVMLPDCHTEGQNILFTDGEYINQIAASRDDGFVVRIFATSTEPVLQQELQLKLARKCLHACGISLFDLEKDLHIISTGFDEESAILGAGREFALMKTANGKIYYTGKYQSLGIKQGGPSAGKWVELPITKSPKIVHFSVGHDGSHALLVAEDGSIFFTGSASKGEDGESSKSRRQSKPYKPKKIIKMEGKIVVYTACNNGSSSVISKDGELYMFGKDAIYSDSSSLVTDLKGHFVTQVAMGKAHTCVLMKNGEVWTFGVNNKGQCGRDTGAMNQGGKGFGVENMATAMDEDLEEELDEKDEKSMMCPPGMHKWKLEQCMVCTVCGDCTGYGASCVSSGRPDRVPGGICGCGSGESGCAVCGCCKACARELDGQEARQRGILDAVKEMIPLDLLLAVPVPGVNIEEHLQLRQEEKRQRVIRRHRLEEGRGPLVFAGPIFMNHREQALARLRSHPAQLKHKRDKHKDGSGERGEKDASKITTYPPGSVRFDCELRAVQVSCGFHHSVVLMENGDVYTFGYGQHGQLGHGDVNSRGCPTLVQALPGPSTQVTAGSNHTAVLLMDGQVFTFGSFSKGQLGRPILDVPYWNAKPAPMPNIGSKYGRKATWIGASGDQTFLRIDEALINSHVLATSEIFASKHIIGLVPASISEPPPFKCLLINKVDGSCKTFNDSEQEDLQGFGVCLDPVYDVIWRFRPNTRELWCYNAVVADARLPSAADMQSRCSILSPELALPTGSRALTTRSHAALHILGCLDTLAAMQDLKMGVASTEEETQAVMKVYSKEDYSVVNRFESHGGGWGYSAHSVEAIRFSADTDILLGGLGLFGGRGEYTAKIKLFELGPDGGDHETDGDLLAETDVLAYDCAAREKYAMMFDEPVLLQAGWWYVAWARVSGPSSDCGSHGQASITTDDGVVFQFKSSKKSNNGTDVNAGQIPQLLYRLPTSDGSASKGKQQTSEPVHILKRSFARTVSVECFESLLSILHWSWTTLVLGVEELRGLKGFQFTATLLDLERLRFVGTCCLRLLRVYTCEIYPVSATGKAVVEETSKLAECIGKTRTLLRKILSEGVDHCMVKLDNDPQGYLSQPLSLLEAVLQECHNTFTACFHSFYPTPALQWACLCDLLNCLDQDIQEANFKTSSSRLLAAVMSALCHTSVKLTSIFPIAYDGEVLLRSIVKQVSTENDSTLVHRFPLLVAHMEKLSQSEENISGMTSFREVLEKMLVIVVLPVRNSLRRENELFSSHLVSNTCGLLASIVSELTASALGSEVDGLNSLHSVKASANRFTKTSQGRSWNTGNGSPDAICFSVDKPGIVVVGFSVYGGGGIHEYELEVLVDDSEHAGDSTHSHRWTSLELVKGTYTTDDSPSDIAEIRLDKVVPLKENVKYAVRLRNYGSRTANGDGGMTTVQCPDGVTFTFSTCSLSSNGTNQTRGQIPQILYYRSEFDGDLQSQLLSKANEEDKNCSRALSVVSTVVRASKDLLHRALAVDADDIPELLSSSSLFSMLLPLIIAYIGPVAAAIPKVAVEVFGLVQQLLPSVAILNQKYAPPAFNPNQSTDSTTGNQPEQGLSACTTSSHYAVIESEHPYKPACVMHYKVTFPECVRWMTIEFDPQCGTAQSEDVLRLLIPVRTVQNSGYGPKLTSVHENLNSWIELKKFSGSSGWPTMVLVLPGNEALFSLETASDYVKDDKASFYGFKCFAIGYEFSPGPDEGVIQLEKELANLGGVCAAALMKKDLALPIGNELEEDLEILEEAALQVCKTHSGILGKGLALSHSPTILEALEGNLPLQIQSNEQSFLDDFIACVPGSSGGRLARWLQPDSYADPQKTSLILNKDDIRCGWPTTITVQTKDQYGDVVHVPNMKVEVKAVPVSQKKMSLQQDQAKKPQRIPGSPAVTAASSNTDMTYGGLASPKLDVSYEPMIVKEARYIAITMMKVYENYSFEELRFASPTPKRPSENMLIRVNNDGTYCANWTPGAIGLYTLHVTIDGIEIDAGLEVKVKDPPKGMIPPGTQLVKPKSEPQPNKVRKFVAKDSAGLRIRSHPSLQSEQIGIVKVNGTITFIDEIHNDDGVWLRLNDETIKKYVPNMNGYTEAWCLSFNQHLGKSLLVPVDESKTNTDDFFKDINSCCPQEATMQEQDMPFLRGGPGMYKVVKTGPSGHNIRSCPNLRGIPIGMLVLGNKVKAVGEVTNSEGTWVQLDQNSMVEFCESDEGEAWSLARDRGGNQYLRHEDEQALLDQNSQTPPPSPFSVQAFNKGASCSAQGFDYGLGNSKGDRGNISTSSKPASTSGKSELSSKHSRSLKPDGRMSRTTADQKKPRGTESLSASESLILKSDAAKLRSDSHSRSLSPNHNTLQTLKSDGRMPSSSRAESPGPGSRLSSPKPKTLPANRSSPSGASSPRSSSPHDKNLPQKSTAPVKTKLDPPRERSKSDSYTLDPDTLRKKKMPLTEPLRGRSTSPKPKSVPKDSTDSPGSENRAPSPHVVQENLHSEVVEVCTSSTLKTNSLTDSTCDDSSEFKSVDEGSNKVHFSIGKAPLKDEQEMRASPKISRKCANRHTRPKKEKSSFLFKGDGSKPLEPAKQAMSPSVAECARAVFASFLWHEGIVHDAMACSSFLKFHPELSKEHAPIRSSLNSQQPTEEKETKLKNRHSLEISSALNMFNIAPHGPDISKMGSINKNKVLSMLKEPPLHEKCEDGKTETTFEMSMHNTMKSKSPLPLTLQHLVAFWEDISLATIKAASQNMIFPSPGSCAVLKKKECEKENKKSKKEKKKKEKAEVRPRGNLFGEMAQLAVGGPEKDTICELCGESHPYPVTYHMRQAHPGCGRYAGGQGYNSIGHFCGGWAGNCGDGGIGGSTWYLVCDRCREKYLREKQAAAREKVKQSRRKPMQVKTPRALPTMEAHQVIKANALFLLSLSSAAEPSILCYHPAKPFQSQLPSVKEGISEDLPVKMPCLYLQTLARHHHENFVGYQDDNLFQDEMRYLRSTSVPAPYISVTPDASPNVFEEPESNMKSMPPSLETSPITDTDLAKRTVFQRSYSVVASEYDKQHSILPARVKAIPRRRVNSGDTEVGSSLLRHPSPELSRLISAHSSLSKGERNFQWPVLAFVIQHHDLEGLEIAMKQALRKSACRVFAMEAFNWLLCNVIQTTSLHDILWHFVASLTPAPVEPEEEEDEENKTSKENSEQEKDTRVCEHPLSDIVIAGEAAHPLPHTFHRLLQTISDLMMSLPSGSSLQQMALRCWSLKFKQSDHQFLHQSNVFHHINNILSKSDDGDSEESFSISIQSGFEAMSQELCIVMCLKDLTSIVDIKTSSRPAMIGSLTDGSTETFWESGDEDKNKTKNITINCVKGINARYVSVHVDNSRDLGNKVTSMTFLTGKAVEDLCRIKQVDLDSRHIGWVTSELPGGDNHIIKIELKGPENTLRVRQVKVLGWKDGESTKIAGQISASVAQQRNCEAETLRVFRLITSQVFGKLISGDAEPTPEQEEKALLSSPEGEEKVYNATSDADLKEHMVGIIFSRSKLTNLQKQVCAHIVQAIRMEATRVREEWEHAISSKENANSQPNDEDASSDAYCFELLSMVLALSGSNVGRQYLAQQLTLLQDLFSLLHTASPRVQRQVTSLLRRVLPEVTPSRLASIIGVKSLPPADISDIIHSTEKGDWNKLGILDMFLGCIAKALTVQLKAKGTTITGTAGTTVGKGVTTVTLPMIFNSSYLRRGESHWWMKGSTPTQISEIIIKLIKDMAAGHLSEAWSRVTKNAIAETIIALTKMEEEFRSPVRCIATTRLWLALASLCVLDQDHVDRLSSGRWMGKDGQQKQMPMCDNHDDGETAAIILCNVCGNLCTDCDRFLHLHRRTKTHQRQVFKEEEEAIKVDLHEGCGRTKLFWLMALADSKTMKAMVEFREHTGKPTTSSSEACRFCGSRSGTELSAVGSVCSDADCQEYAKIACSKTHPCGHPCGGVKNEEHCLPCLHGCDKSATSLKQDADDMCMICFTEALSAAPAIQLDCSHIFHLQCCRRVLENRWLGPRITFGFISCPICKNKINHIVLKDLLDPIKELYEDVRRKALMRLEYEGLHKSEAITTPGVRFYNDPAGYAMNRYAYYVCYKCRKAYFGGEARCDAEAGRGDDYDPRELICGACSDVSRAQMCPKHGTDFLEYKCRYCCSVAVFFCFGTTHFCNACHDDFQRMTSIPKEELPHCPAGPKGKQLEGTECPLHVVHPPTGEEFALGCGVCRNAHTF

SEQ ID NO: 2104 - protein, 109 aa, Homo sapiens
MAGALVRKAADYVRSKDFRDYLMRTHFWGPVANWGLPIAAINDMKKSPEIISGRMTFALCCYSLTFMRFAYKVQPRNWLLFACHATNEVAQLIQGGRLIKHEMTKTASA

SEQ ID NO: 2105 - protein, 1191 aa, Homo sapiens
MPGTPGSLEMGLLTFRDVAIEFSPEEWQCLDTAQQNLYRNVMLENYRNLAFLGIALSKPDLITYLEQGKEPWNMKQHEMVDEPTGICPHFPQDFWPEQSMEDSFQKVLLRKHEKCGHENLQLRKGCKSVDECKVHKEGYNKLNQCLTTAQSKVFQCGKYLKVFYKFLNSNRHTIRHTGKKCFKCKKCVKSFCIRLHKTQHKCVYITEKSCKCKECEKTFHWSSTLTNHKEIHTEDKPYKCEECGKAFKQLSTLTTHKIICAKEKIYKCEECGKAFLWSSTLTRHKRIHTGEKPYKCEECGKAFSHSSTLAKHKRIHTGEKPYKCEECGKAFSRSSTLAKHKRIHTGEKPYKCKECGKAFSNSSTLANHKITHTEEKPYKCKECDKAFKRLSTLTKHKIIHAGEKLYKCEECGKAFNRSSNLTIHKFIHTGEKPYKCEECGKAFNWSSSLTKHKRFHTREKPFKCKECGKAFIWSSTLTRHKRIHTGEKPYKCEECGKAFRQSSTLTKHKIIHTGEKPYKFEECGKAFRQSLTLNKHKIIHSREKPYKCKECGKAFKQFSTLTTHKIIHAGKKLYKCEECGKAFNHSSSLSTHKIIHTGEKSYKCEECGKAFLWSSTLRRHKRIHTGEKPYKCEECGKAFSHSSALAKHKRIHTGEKPYKCKECGKAFSNSSTLANHKITHTEEKPYKCKECDKTFKRLSTLTKHKIIHAGEKLYKCEECGKAFNRSSNLTIHKFIHTGEKPYKCEECGKAFNWSSSLTKHKRIHTREKPFKCKECGKAFIWSSTLTRHKRIHTGEKPYKCEECGKAFSRSSTLTKHKTIHTGEKPYKCKECGKAFKHSSALAKHKIIHAGEKLYKCEECGKAFNQSSNLTTHKIIHTKEKPSKSEECDKAFIWSSALTEHKRIHTREKTYKCEECGKAFSQPSHLTTHKRMHTGEKPYKCEECGKAFSQSSTLTTHKIIHTGEKPYKCEECGKAFRKSSTLTEHKIIHTGEKPYKCEECGKAFSQSSTLTRHTRMHTGEKPYKCEECGKAFNRSSKLTTHKIIHTGEKPYKCEECGKAFISSSTLNGHKRIHTREKPYKCEECGKAFSQSSTLTRHKRLHTGEKPYKCGECGKAFKESSALTKHKIIHTGEKPYKCEKCGKAFNQSSILTNHKKIHTITPVIPALWEAEAGGSRGQEMETILANTVKPLLY

SEQ ID NO: 2106 - protein, 719 aa, Homo sapiens
MMKLIINSLYKNKEIFLRELISNASDALDKIRLISLTDENALSGNEELTVKIKCDKEKNLLHVTDTGVGMTREELVKNLGTIAKSGTSEFLNKMTEAQEDGQSTSELIGQFGVGFYSAFLVADKVIVTSKHNNDTQHIWESDSNEFSVIADPRGNTLGRGTTITLVLKEEASDYLELDTIKNLVKKYSQFINFPIYVWSSKTETVEEPMEEEEAAKEEKEESDDEAAVEEEEEEKKPKTKKVEKTVWDWELMNDIKPIWQRPSKEVEEDEYKAFYKSFSKESDDPMAYIHFTAEGEVTFKSILFVPTSAPRGLFDEYGSKKSDYIKLYVRRVFITDDFHDMMPKYLNFVKGVVDSDDLPLNVSRETLQQHKLLKVIRKKLVRKTLDMIKKIADDKYNDTFWKEFGTNIKLGVIEDHSNRTRLAKLLRFQSSHHPTDITSLDQYVERMKEKQDKIYFMAGSSRKEAESSPFVERLLKKGYEVIYLTEPVDEYCIQALPEFDGKRFQNVAKEGVKFDESEKTKESREAVEKEFEPLLNWMKDKALKDKIEKAVVSQRLTESPCALVASQYGWSGNMERIMKAQAYQTGKDISTNYYASQKKTFEINPRHPLIRDMLRRIKEDEDDKTVLDLAVVLFETATLRSGYLLPDTKAYGDRIERMLRLSLNIDPDAKVEEEPEEEPEETAEDTTEDTEQDEDEEMDVGTDEEEETAKESTAEKDEL

SEQ ID NO: 2107 - protein, 359 aa, Homo sapiens
MVDIIFHYPFLGAMGDHSKKKPGTAMCVGCGSQIHDQFILRVSPDLEWHAACLKCAECSQYLDETCTCFVRDGKTYCKRDYVRLFGIKCAKCQVGFSSSDLVMRARDSVYHIECFRCSVCSRQLLPGDEFSLREHELLCRADHGLLLERAAAGSPRSPGPLPGARGLHLPDAGSGRQPALRPHVHKQTEKTTRVRTVLNEKQLHTLRTCYAANPRPDALMKEQLVEMTGLSPRVIRVWFQNKRCKDKKKSILMKQLQQQQHSDKTSLQGLTGTPLVAGSPIRHENAVQGSAVEVQTYQPPWKALSEFALQSDLDQPAFQQLVSFSESGSLGNSSGSDVTSLSSQLPDTPNSMVPSPVET

SEQ ID NO: 2108 - protein, 180 aa, Homo sapiens [sequence omitted]

SEQ ID NO: 2109 - protein, 222 aa, Homo sapiens
MLSRAVCGTSRQLAPVLGYLGSRQKHSLPDLPYDYGALEPHINAQIMQLHHSKHHAAYVNNLNVTEEKYQEALAKGDVTAQIALQPALKFNGGGHINHSIFWTNLSPNGGGEPKGELLEAIKRDFGSFDKFKEKLTAASVGVQGSGWGWLGFNKERGHLQIAACPNQDPLQGTTGLIPLLGIDVWEHAYYLQYKNVRPDYLKAIWNVINWENVTERYMACKK

SEQ ID NO: 2110 - protein, 474 aa, Homo sapiens
MFLSSCTFEVSGKPFTCKEVGKDFLVRSRFLQQQAAHTRKKSNRTKSAVAFHSVKNHYNWGECVKAFSYKHVRVQHQGDLIRERSYMCSECGKSFSTSCSLSDHLRVHTSEKPYTCGECGKSYRQSSSLITHRRIHTGVRPHQCDECGKLFNRKYDLLIHQRVHTGERPYKCSECGKSFSHSSSLITHQRIHTGMRPYECSECGKSFIHSSSLITHQRVHTGTRPYMCSECGKSFSQSCHLIKHRRLHIGEGPYECSECGKLFTYRSRFFQHQRVHTGVRSHECHECGKLFSRKFDLIVHERVHTGERPYECSECGKSFTCKSYLISHWKVHTGARPYECGECGKSFTHSSTLLQHQRVHTGERPYECNECGKFFSQSSSLIRHRRSHTGERPYECSECWKSFSNHSSLVKHRRVHTGERPYECSECGKSFSQSSNLTNHQRIHSGERPYECSDCGKFFTFNSNLLKHQNVHKG

SEQ ID NO: 2111 - protein, 146 aa, Homo sapiens
MRLLGLLTLNMNIAMPSWFDIIGLSPDSQEDESGIKQAAQNIKALIDQEVKNGIPSNRIILGGFSQGGALSLYTALTTHQKLAGVTALNCWLPLWASFPQGPIGGANRDISILQCHGDCDPLVPLMFGSLTVEKLKNIGESSQCDL

SEQ ID NO: 2112 - protein, 983 aa, Homo sapiens
MTEHKMSVEEVCRKYNTDCVQGLTHSKAQEILARDGPNALTPPPTTPEWVKFCRQLFGGFSILLWIGAILCFLAYGIQAGTEDDPSGDNLYLGIVLAAVVIITGCFSYYQEAKSSKIMESFKNMVPQQALVIREGEKMQVNAEEVVVGDLVEIKGGDRVPADLRIISAHGCKVDNSSLTGESEPQTRSPDCTHDNPLETRNITFFSTNCVEGTARGVVVATGDRTVMGRIATLASGLEVGKTPIAIEIEHFIQLITGVAVFLGVSFFILSLILGYTWLEAVIFLIGIIVANVPEGLLATVTVCLTLTAKRMARKNCLVKNLEAVETLGSTSTICSDKTGTLTQNRMTVAHMWFDNQIHEADTTEDQSGTSFDKSSHTWVALSHIAGLCNRAVFKGGQDNIPVLKRDVAGDASESALLKCIELSSGSVKLMRERNKKVAEIPFNSTNKYQLSIHETEDPNDNRYLLVMKGAPERILDRCSTILLQGKEQPLDEEMKEAFQNAYLELGGLGERVLGFCHYYLPEEQFPKGFAFDCDDVNFTTDNLCFVGLMSMIDPPRAAVPDAVGKCRSAGIKVIMVTGDHPITAKAIAKGVGIISEGNETVEDIAARLNIPVSQVNPRDAKACVIHGTDLKDFTSEQIDEILQNHTEIVFARTSPQQKLIIVEGCQRQGAIVAVTGDGVNDSPALKKADIGVAMGIAGSDVSKQAADMILLDDNFASIVTGVEEGRLIFDNLKKSIAYTLTSNIPEITPFLLFIMANIPLPLGTITILCIDLGTDMVPAISLAYEAAESDIMKRQPRNPRTDKLVNERLISMAYGQIGMIQALGGFFSYFVILAENGFLPGNLVGIRLNWDDRTVNDLEDSYGQQWTYEQRKVVEFTCHTAFFVSIVVVQWADLIICKTRRNSVFQQGMKNKILIFGLFEETALAAFLSYCPGMDVALRMYPLKPSWWFCAFPYSFLIFVYDEIRKLILRRNPGGWVEKETYY

SEQ ID NO: 2113 - protein, 1013 aa, Homo sapiens
MGDKKDDKDSPKKNKGKERRDLDDLKKEVAMTEHKMSVEEVCRKYNTDCVQGLTHSKAQEILARDGPNALTPPPTTPEWVKFCRQLFGGFSILLWIGAILCFLAYGIQAGTEDDPSGDNLYLGIVLAAVVIITGCFSYYQEAKSSKIMESFKNMVPQQALVIREGEKMQVNAEEVVVGDLVEIKGGDRVPADLRIISAHGCKVDNSSLTGESEPQTRSPDCTHDNPLETRNITFFSTNCVEGTARGVVVATGDRTVMGRIATLASGLEVGKTPIAIEIEHFIQLITGVAVFLGVSFFILSLILGYTWLEAVIFLIGIIVANVPEGLLATVTVCLTLTAKRMARKNCLVKNLEAVETLGSTSTICSDKTGTLTQNRMTVAHMWFDNQIHEADTTEDQSGTSFDKSSHTWVALSHIAGLCNRAVFKGGQDNIPVLKRDVAGDASESALLKCIELSSGSVKLMRERNKKVAEIPFNSTNKYQLSIHETEDPNDNRYLLVMKGAPERILDRCSTILLQGKEQPLDEEMKEAFQNAYLELGGLGERVLGFCHYYLPEEQFPKGFAFDCDDVNFTTDNLCFVGLMSMIDPPRAAVPDAVGKCRSAGIKVIMVTGDHPITAKAIAKGVGIISEGNETVEDIAARLNIPVSQVNPRDAKACVIHGTDLKDFTSEQIDEILQNHTEIVFARTSPQQKLIIVEGCQRQGAIVAVTGDGVNDSPALKKADIGVAMGIAGSDVSKQAADMILLDDNFASIVTGVEEGRLIFDNLKKSIAYTLTSNIPEITPFLLFIMANIPLPLGTITILCIDLGTDMVPAISLAYEAAESDIMKRQPRNPRTDKLVNERLISMAYGQIGMIQALGGFFSYFVILAENGFLPGNLVGIRLNWDDRTVNDLEDSYGQQWTYEQRKVVEFTCHTAFFVSIVVVQWADLIICKTRRNSVFQQGMKNKILIFGLFEETALAAFLSYCPGMDVALRMYPLKPSWWFCAFPYSFLIFVYDEIRKLILRRNPGGWVEKETYY

SEQ ID NO: 2114 - protein, 1280 aa, Homo sapiens
MARAKTVMNSKTHPPKCIQCGQYLDDPDLKYGQHPPDAVDEPQMLTNEKLSIFDANESGFESYEALPQHKLTCFSVYCKHGHLCPIDTGLIEKNIELFFSGSAKPIYDDDPSLEGGVNGKNLGPINEWWITGFDGGEKALIGFSTSFAEYILMDPSPEYAPIFGLMQEKIYISKIVVEFLQSNSDSTYEDLINKIETTVPPSGLNLNRFTEDSLLRHAQFVVEQVESYDEAGDSDEQPIFLTPCMRDLIKLAGVTLGQRRAQARRQTIRHSTREKDRGPTKATTTKLVYQIFDTFFAEQIEKDDREDKENAFKRRRCGVCEVCQQPECGKCKACKDMVKFGGSGRSKQACQERRCPNMAMKEADDDEEVDDNIPEMPSPKKMHQGKKKKQNKNRISWVGEAVKTDGKKSYYKKVCIDAETLEVGDCVSVIPDDSSKPLYLARVTALWEDSSNGQMFHAHWFCAGTDTVLGATSDPLELFLVDECEDMQLSYIHSKVKVIYKAPSENWAMEGGMDPESLLEGDDGKTYFYQLWYDQDYARFESPPKTQPTEDNKFKFCVSCARLAEMRQKEIPRVLEQLEDLDSRVLYYSATKNGILYRVGDGVYLPPEAFTFNIKLSSPVKRPRKEPVDEDLYPEHYRKYSDYIKGSNLDAPEPYRIGRIKEIFCPKKSNGRPNETDIKIRVNKFYRPENTHKSTPASYHADINLLYWSDEEAVVDFKAVQGRCTVEYGEDLPECVQVYSMGGPNRFYFLEAYNAKSKSFEDPPNHARSPGNKGKGKGKGKGKPKSQACEPSEPEIEIKLPKLRTLDVFSGCGGLSEGFHQAGISDTLWAIEMWDPAAQAFRLNNPGSTVFTEDCNILLKLVMAGETTNSRGQRLPQKGDVEMLCGGPPCQGFSGMNRFNSRTYSKFKNSLVVSFLSYCDYYRPRFFLLENVRNFVSFKRSMVLKLTLRCLVRMGYQCTFGVLQAGQYGVAQTRRRAIILAAAPGEKLPLFPEPLHVFAPRACQLSVVVDDKKFVSNITRLSSGPFRTITVRDTMSDLPEVRNGASALEISYNGEPQSWFQRQLRGAQYQPILRDHICKDMSALVAARMRHIPLAPGSDWRDLPNIEVRLSDGTMARKLRYTHHDRKNGRSSSGALRGVCSCVEAGKACDPAARQFNTLIPWCLPHTGNRHNHWAGLYGRLEWDGFFSTTVTNPEPMGKQGRVLHPEQHRVVSVRECARSQGFPDTYRLFGNILDKHRQVGNAVPPPLAKAIGLEIKLCMLAKARESASAKIKEEEAAKD

SEQ ID NO: 2115 - protein, 311 aa, Homo sapiens [sequence omitted]

SEQ ID NO: 2116 - protein, 252 aa, Homo sapiens
MTPLCPRPALCYHFLTSLLRSAMQNARGARQRAEAAVLSGPGPPLGRAAQHGIPRPLSSAGRLSQGCRGASTVGAAGWKGELPKAGGSPAPGPETPAISPSKRARPAEVGGMQLRFARLSEHATAPTRGSARAAGYDLYSAYDYTIPPMEKAVVKTDIQIALPSGCYGRVAPRSGLAAKHFIDVGAGVIDEDYRGNVGVVLFNFGKEKFEVKKGDRIAQLICERIFYPEIEEVQALDDTERGSGGFGSTGKN

SEQ ID NO: 2117 - protein, 1275 aa, Homo sapiens
MSLDFGSVALPVQNEDEEYDEEDYEREKELQQLLTDLPHDMLDDDLSSPELQYSDCSEDGTDGQPHHPEQLEMSWNEQMLPKSQSVNGPSCQGLEPYNKVTYKPYQSSAQNNGSPAQEITGSDTFEGLQQQFLGANENSAENMQIIQLQVLNKAKERQLENLIEKLNESERQIRYLNHQLVIIKDEKDGLTLSLRESQKLFQNGKEREIQLEAQIKALETQIQALKVNEEQMIKKSRTTEMALESLKQQLVDLHHSESLQRAREQHESIVMGLTKKYEEQVLSLQKNLDATVTALKEQEDICSRLKDHVKQLERNQEAIKLEKTEIINKLTRSLEESQKQCAHLLQSGSVQEVAQLQFQLQQAQKAHAMSANMNKALQEELTELKDEISLYESAAKLGIHPSDSEGELNIELTESYVDLGIKKVNWKKSKVTSIVQEEDPNEELSKDEFILKLKAEVQRLLGSNSMKRHLVSQLQNDLKDCHKKIEDLHQVKKDEKSIEVETKTDTSEKPKNQLWPESSTSDVVRDDILLLKNEIQVLQQQNQELKETEGKLRNTNQDLCNQMRQMVQDFDHDKQEAVDRCERTYQQHHEAMKTQIRESLLAKHALEKQQLFEAYERTHLQLRSELDKLNKEVTAVQECYLEVCREKDNLELTLRKTTEKEQQTQEKIKEKLIQQLEKEWQSKLDQTIKAMKKKTLDCGSQTDQVTTSDVISKKEMAIMIEEQKCTIQQNLEQEKDIAIKGAMKKLEIELELKHCENITKQVEIAVQNAHQRWLGELPELAEYQALVKAEQKKWEEQHEVSVNKRISFAVSEAKEKWKSELENMRKNILPGKELEEKIHSLQKELELKNEEVPVVIRAELAKARSEWNKEKQEEIHRIQEQNEQDYRQFLDDHRNKINEVLAAAKEDFMKQKTELLLQKETELQTCLDQSRREWTMQEAKRIQLEIYQYEEDILTVLGVLLSDTQKEHISDSEDKQLLEIMSTCSSKWMSVQYFEKLKGCIQKAFQDTLPLLVENADPEWKKRNMAELSKDSASQGTGQGDPGPAAGHHAQPLALQATEAEADKKKVLEIKDLCCGHCFQELEKAKQECQDLKGKLEKCCRHLQHLERKHKAVVEKIGEENNKVVEELIEENNDMKNKLEELQTLCKTPPRSLSAGAIENACLPCSGGALEELRGQYIKAVKKIKCDMLRYIQESKERAAEMVKAEVLRERQETARKMRKYYLICLQQILQDDGKEGAEKKIMNAASKLATMAKLLETPISSKSQSKTTQSGMSK

SEQ ID NO: 2118 - protein, 1101 aa, Homo sapiens
MDRAPTEQNVKLSAEVEPFIPQKKSPDTFMIPMALPNDNGSVSGVEPTPIPSYLITCYPFVQENQSNRQFPLYNNDIRWQQPNPNPTGPYFAYPIISAQPPVSTEYTYYQLMPAPCAQVMGFYHPFPTPYSNTFQAANTVNAITTECTERPSQLGQVFPLSSHRSRNSNRGSVVPKQQLLQQHIKSKRPLVKNVATQKETNAAGPDSRSKIVLLVDASQQTDFPSDIANKSLSETTATMLWKSKGRRRRASHPTAESSSEQGASEADIDSDSGYCSPKHSNNQPAAGALRNPDSGTMNHVESSMCAGGVNWSNVTCQATQKKPWMEKNQTFSRGGRQTEQRNNSQVGFRCRGHSTSSERRQNLQKRPDNKHLSSSQSHRSDPNSESLYFEDEDGFQELNENGNAKDENIQQKLSSKVLDDLPENSPINIVQTPIPITTSVPKRAKSQKKKALAAALATAQEYSEISMEQKKLQEALSKAAGKKNKTPVQLDLGDMLAALEKQQQAMKARQITNTRPLSYTVVTAASFHTKDSTNRKPLTKSQPCLTSFNSVDIASSKAKKGKEKEIAKLKRPTALKKVILKEREEKKGRLTVDHNLLGSEEPTEMHLDFIDDLPQEIVSQEDTGLSMPSDTSLSPASQNSPYCMTPVSQGSPASSGIGSPMASSTITKIHSKRFREYCNQVLCKEIDECVTLLLQELVSFQERIYQKDPVRAKARRRLVMGLREVTKHMKLNKIKCVIISPNCEKIQSKGGLDEALYNVIAMAREQEIPFVFALGRKALGRCVNKLVPVSVVGIFNYFGAESLFNKLVELTEEARKAYKDMVAAMEQEQAEEALKNVKKVPHHMGHSRNPSAASAISFCSVISEPISEVNEKEYETNWRNMVETSDGLEASENEKEVSCKHSTSEKPSKLPFDTPPIGKQPSLVATGSTTSATSAGKSTASDKEEVKPDDLEWASQQSTETGSLDGSCRDLLNSSITSTTSTLVPGMLEEEEDEDEEEEEDYTHEPISVEVQLNSRIESWVSETQRTMETLQLGKTLNGSEEDNVEQSGEEEAEAPEVLEPGMDSEAWTADQQASPGQQKSSNCSSLNKEHSDSNYTTQTT

SEQ ID NO: 2119 - protein, 1114 aa, Homo sapiens
MLKTEKTKPEVLEAHYGSAEPEKVLRVLHRDAILAQEKSIGEDVYEKPISELDRLEEKQKETYRRMLEQLLLAEKCHRRTVYELENEKHKHTDYMNKSDDFTNLLEQERERLKKLLEQEKAYQARKEKENAKRLNKLRDELVKLKSFALMLVDERQMHIEQLGLQSQKVQDLTQKLREEEEKLKAITSKSKEDRQKLLKLEVDFEHKASRFSQEHEEMNAKLANQESHNRQLRLKLVGLTQRIEELEETNKNLQKAEEELQELRDKIAKGECGNSSLMAEVENLRKRVLEMEGKDEEITKTESQCRELRKKLQEEEHHSKELRLEVEKLQKRMSELEKLEEAFSKSKSECTQLHLNLEKEKNLTKDLLNELEVVKSRVKELECSESRLEKAELSLKDDLTKLKSFTVMLVDERKNMMEKIKQEERKVDGLNKNFKVEQGKVMDVTEKLIEESKKLLKLKSEMEEKVYNLTRERDELIGKLKSEEEKSSELSCSVDLLKKRLDGIEEVEREITRGRSRKGSELTCPEDNKIKELTLEIERLKKRLQQLEVVEGDLMKTEDEYDQLEQKFRTEQDKANFLSQQLEEIKHQIAKNKAIEKGEVVSQEAELRHRFRLEEAKSRDLKAEVQALKEKIHELMNKEDQLSQLQVDYSVLQQRFMEEENKNKNMGQEVLNLTKELELSKRYSRALRPSVNGRRMVDVPVTSTGVQTDAVSGEAAEEETPAVFIRKSFQEENHIMSNLRQVGLKKPVERSSVLDRYPPAANELTMRKSWIPWMRKRENGPSITQEKGPRTNSSPGHPGEVVLSPKQGQPLHIRVTPDHENSTATLEITSPTSEEFFSSTTVIPTLGNQKPRITIIPSPNVMPQKQKSGDTTLGPERAMSPVTITTFSREKTPESGRGAFADRPTSPIQIMTVSTSAAPAEIAVSPESQEMPMGRTILKVTPEKQTVPTPVRKYNSNANIITTEDNKIHIHLGSQFKRSPGTSGEGVSPVITVRPVNVTAEKEVSTGTVLRSPRNHLSSRPGASKVTSTITITPVTTSSARGTQSVSGQDGSSQRPTPTRIPMSKGMKAGKPVVAAPGAGNLTKFEPRAETQSMKIELKKSAASSTTSLGGGKG

SEQ ID NO: 2120 - protein, 756 aa, Homo sapiens
MSPQKRVKNVQAQNRTSQGSSSFQTTLSAWKVKQDPSNSKNISKHGQNNPVGDYEHADDQAEEDALQMAVGYFEKGPIKASQNKDKTLEKHLKTVENVAWKNGLASEEIDILLNIALSGKFGNAVNTRILKCMIPATVISEDSVVKAVSWLCVGKCSGSTKVLFYRWLVAMFDFIDRKEQINLLYGFFFASLQDDALCPYVCHLLYLLTKKENVKPFRVRKLLDLQAKMGMQPHLQALLSLYKFFAPALISVSLPVRKKIYFKNSENLWKTALLAVKQRNRGPSPEPLKLMLGPANVRPLKRKWNSLSVIPVLNSSSYTKECGKKEMSLSDCLNRSGSFPLEQLQSFPQLLQNIHCLELPSQMGSVLNNSLLLHYINCVRDEPVLLRFYYWLSQTLQEECIWYKVNNYEHGKEFTNFLDTIIRAECFLQEGFYSCEAFLYKSLPLWDGLCCRSQFLQLVSWIPFSSFSEVKPLLFDHLAQLFFTSTIYFKCSVLQSLKELLQNWLLWLSMDIHMKPVTNSPLETTLGGSMNSVSKLIHYVGWLSTTAMRLESNNTFLLHFILDFYEKVCDIYINYNLPLVVLFPPGIFYSALLSLDTSILNQLCFIMHRYRKNLTAAKKNELVQKTKSEFNFSSKTYQEFNHYLTSMVGCLWTSKPFGKGIYIDPEILEKTGVAEYKNSLNVVHHPSFLSYAVSFLLQESPEERTVNVSSIRGKKWSWYLDYLFSQGLQGLKLFIRSSVHHSSIPRAEGINCNNQY

SEQ ID NO: 2121 - protein, 389 aa, Homo sapiens
MKNNQITNNQRIKAAVPSIKFCLDNGAKSVVLMSHLGRPDGVPMPDKYSLEPVAVELKSLLGKDVLFLKDCVGPEVEKACANPAAGSVILLENLRFHVEEEGKGKDASGNKVKAEPAKIEAFRASLSKLGDVYVNDAFGTAHRAHSSMVGVNLPQKAGGFLMKKELNYFAKALESPERPFLAILGGAKVADKIQLINNMLDKVNEMIIGGGMAFTFLKVLNNMEIGTSLFDEEGAKIVKDLMSKAEKNGVKITLPVDFVTADKFDENAKTGQATVASGIPAGWMGLDCGPESSKKYAEAVTRAKQIVWNGPVGVFEWEAFARGTKALMDEVVKATSRGCITIIGGGDTATCCAKWNTEDKVSHVSTGGGASLELLEGKVLPGVDALSNI

SEQ ID NO: 2122 - protein, 1299 aa, Homo sapiens
MEPPSCIQDEPFPHPLEPEPGVSAQPGPGKPSDKRFRLWYVGGSCLDHRTTLPMLPWLMAEIRRRSQKPEAGGCGAPAAREVILVLSAPFLRCVPAPGAGASGGTSPSATQPNPAVFIFEHKAQHISRFIHNSHDLTYFAYLIKAQPDDPESQMACHVFRATDPSQVPDVISSIRQLSKAAMKEDAKPSKDNEDAFYNSQKFEVLYCGKVTVTHKKAPSSLIDDCMEKFSLHEQQRLKIQGEQRGPDPGEDLADLEVVVPGSPGDCLPEEADGTDTHLGLPAGASQPALTSSRVCFPERILEDSGFDEQQEFRSRCSSVTGVQRRVHEGSQKSQPRRRHASAPSHVQPSDSEKNRTMLFQVGRFEINLISPDTKSVVLEKNFKDISSCSQGIKHVDHFGFICRESPEPGLSQYICYVFQCASESLVDEVMLTLKQAFSTAAALQSAKTQIKLCEACPMHSLHKLCERIEGLYPPRAKLVIQRHLSSLTDNEQADIFERVQKMKPVSDQEENELVILHLRQLCEAKQKTHVHIGEGPSTISNSTIPENATSSGRFKLDILKNKAKRSLTSSLENIFSRGANRMRGRLGSVDSFERSNSLASEKDYSPGDSPPGTPPASPPSSAWQTFPEEDSDSPQFRRRAHTFSHPPSSTKRKLNLQDGRAQGVRSPLLRQSSSEQCSNLSSVRRMYKESNSSSSLPSLHTSFSAPSFTAPSFLKSFYQNSGRLSPQYENEIRQDTASESSDGEGRKRTSSTCSNESLSVGGTSVTPRRISWRQRIFLRVASPMNKSPSAMQQQDGLDRNELLPLSPLSPTMEEEPLVVFLSGEDDPEKIEERKKSKELRSLWRKAIHQQILLLRMEKENQKLEGASRDELQSRKVKLDYEEVGACQKEVLITWDKKLLNCRAKIRCDMEDIHTLLKEGVPKSRRGEIWQFLALQYRLRHRLPNKQQPPDISYKELLKQLTAQQHAILVDLGRTFPTHPYFSVQLGPGQLSLFNLLKAYSLLDKEVGYCQGISFVAGVLLLHMSEEQAFEMLKFLMYDLGFRKQYRPDMMSLQIQMYQLSRLLHDYHRDLYNHLEENEISPSLYAAPWFLTLFASQFSLGFVARVFDIIFLQGTEVIFKVALSLLSSQETLIMECESFENIVEFLKNTLPDMNTSEMEKIITQVFEMDISKQLHAYEVEYHVLQDELQESSYSCEDSETLEKLERANSQLKRQNMDLLEKLQVAHTKIQALESNLENLLTRETKMKSLIRTLEQEKMAYQKTVEQLRKLLPADALVNCDLLLRDLNCNPNNKAKIGNKP

SEQ ID NO: 2123 - protein, 220 aa, Homo sapiens [sequence omitted]

SEQ ID NO: 2124 - protein, 1328 aa, Homo sapiens
MPEQERQITAREGASRKILSKLSLPTRAWEPAMKKSFAFDNVGYEGGLDGLGPSSQVATSTVRILGMTCQSCVKSIEDRISNLKGIISMKVSLEQGSATVKYVPSVVCLQQVCHQIGDMGFEASIAEGKAASWPSRSLPAQEAVVKLRVEGMTCQSCVSSIEGKVRKLQGVVRVKVSLSNQEAVITYQPYLIQPEDLRDHVNDMGFEAAIKSKVAPLSLGPIDIERLQSTNPKRPLSSANQNFNNSETLGHQGSHVVTLQLRIDGMHCKSCVLNIEENIGQLLGVQSIQVSLENKTAQVKYDPSCTSPVALQRAIEALPPGNFKVSLPDGAEGSGTDHRSSSSHSPGSPPRNQVQGTCSTTLIAIAGMTCASCVHSIEGMISQLEGVQQISVSLAEGTATVLYNPSVISPEELRAAIEDMGFEASVVSESCSTNPLGNHSAGNSMVQTTDGTPTSVQEVAPHTGRLPANHAPDILAKSPQSTRAVAPQKCFLQIKGMTCASCVSNIERNLQKEAGVLSVLVALMAGKAEIKYDPEVIQPLEIAQFIQDLGFEAAVMEDYAGSDGNIELTITGMTCASCVHNIESKLTRTNGITYASVALATSKALVKFDPEIIGPRDIIKIIEEIGFHASLAQRNPNAHHLDHKMEIKQWKKSFLCSLVFGIPVMALMIYMLIPSNEPHQSMVLDHNIIPGLSILNLIFFILCTFVQLLGGWYFYVQAYKSLRHRSANMDVLIVLATSIAYVYSLVILVVAVAEKAERSPVTFFDTPPMLFVFIALGRWLEHLAKSKTSEALAKLMSLQATEATVVTLGEDNLIIREEQVPMELVQRGDIVKVVPGGKFPVDGKVLEGNTMADESLITGEAMPVTKKPGSTVIAGSINAHGSVLIKATHVGNDTTLAQIVKLVEEAQMSKAPIQQLADRFSGYFVPFIIIMSTLTLVVWIVIGFIDFGVVQRYFPNPNKHISQTEVIIRFAFQTSITVLCIACPCSLGLATPTAVMVGTGVAAQNGILIKGGKPLEMAHKIKTVMFDKTGTITHGVPRVMRVLLLGDVATLPLRKVLAVVGTAEASSEHPLGVAVTKYCKEELGTETLGYCTDFQAVPGCGIGCKVSNVEGILAHSERPLSAPASHLNEAGSLPAEKDAVPQTFSVLIGNREWLRRNGLTISSDVSDAMTDHEMKGQTAILVAIDGVLCGMIAIADAVKQEAALAVHTLQSMGVDVVLITGDNRKTARAIATQVGINKVFAEVLPSHKVAKVQELQNKGKKVAMVGDGVNDSPALAQADMGVAIGTGTDVAIEAADVVLIRMICWMWWLAFTFPRGLSEGYASTWSWH

SEQ ID NO: 2125 - protein, 1401 aa, Homo sapiens
  VARIANT 1248, 1249, 1250, 1251: Xaa = Any Amino Acid
MQETQLCSTDSPLPLEKEEQVRLQARKWLEEQLKQYRVKRQQERSSQPATKTRLFSTLDPELMLNPENLPRASTLAMTKEYSFLRTSVPRGPKVGSLGLPAHPREKKTSKSSKIRSLADYRTEDSNAGNSGGNVPAPDSTKGSLKQNRSSAASVVSEISLSPDTDDRLENTSLAGDSVSEVDGNDSDSSSYSSASTRGTYGILSKTVGTQDTPYMVNGQEIPADTLGQFPSIKDVLQAAAAEHQDQGQEVNGEVRSRRDSICSSVSLESSAAETQEEMLQVLKEKMRLEGQLEALSLEASQALKEKAELQAQLAALSTKLQAQVECSHSSQQRQDSLSSEVDTLKQSCWDLERAMTDLQNMLEAKNASLASSNNDLQVAEEQYQRLMAKVEDMQRSMLSKDNTVHDLRQQMTALQSQLQQVQLERTTLTSKLKASQAEISSLQSVRQWYQQQLALAQEARVRLQGEMAHIQVGQMTQAGLLEHLKLENVSLSQQLTETQHRSMKEKGRIAAQLQGIEADMLDQEAAFMQIQEAKTMVEEDLQRRLEEFEGERERLQRMADSAASLEQQLEQVKLTLLQRDQQLEALQQEHLDLMKQLTLTQEALQSREQSLDALQTHYDELQARLGELQGEAASREDTICLLQNEKIILEAALQAAKSGKEELDRGARRLEEGTEETSETLEKLREELAIKSGQVEHLQQETAALKKQMQKIKEQFLQQKVMVEAYRRDATSKDQLISELKATRKRLDSELKELRQELMQVHGEKRTAEAELSRLHREVAQVRQHMADLEGHLQSAQKERDEMETHLQSLQFDKEQMVAVTEANEALKKQIEELQQEARKAITEQKQKMRRLGSDLTSAQKEMKTKHKAYENAVGILSRRLQEALAAKEAADAELGQLRAQGGSSDSSLALHERIQALEAELQAVSHSKTLLEKELQEVIALTSQELEESREKVLELEDELQESRGFRKKIKRLEESNKKLALELEHEKGKLTGLGQSNAALREHNSILETALAKREADLVQLNLQVQAVLQRKEEEDRQMKHLVQALQASLEKEKEKVNSLKEQVAAAKVEAGHNRRHFKAASLELSEVKKELQAKEHLVQKLQAEADDLQIREGKHSQEIAQFQAELAEARAQLQLLQKQLDEQLSKQPVGNQEMENLKWEVDQKEREIQSLKQQLDLTEQQGRKELEGLQQLLQNVKSELEMAQEDLSMTQKDKFMLQAKVSELKNNMKTLLQQNQQLKLDLRRXXXXKGAERRGQLFQPCHAHQDPGLPSSRLAAGGAAETTARREQGAPQEPEQLPPAAQAGDGQPAAPDGGARPDGARVSVLVDAAGASHCQPCAPGGSRRPTRRPTETQSEQGFQRRAGRVTAVDSPPCAAAPEGSYQCYLFDCVVDVFLRHEI

SEQ ID NO: 2126 - protein, 719 aa, Homo sapiens
MSVDKAELCGSLLTWLQTFHVPSPCASPQDLSSGLAVAYVLNQIDPSWFNEAWLQGISEDPGPNWKLKVSNLKMVLRSLVEYSQDVLAHPVSEEHLPDVSLIGEFSDPAELGKLLQLVLGCAISCEKKQDHIQRIMTLEESVQHVVMEAIQELMTKDTPDSLSPETYGNFDSQSRRYYFLSEEAEEGDELQQRCLDLERQLMLLSEEKQSLAQENAGLRERMGRPEGEGTPGLTAKKLLLLQSQLEQLQEENFRLESGREDERLRCAELEREVAELQHRNQALTSLAQEAQALKDEMDELRQSSERAGQLEATLTSCRRRLGELRELRRQVRQLEERNAGHAERTRQLEDELRRAGSLRAQLEAQRRQVQELQGQRQEEAMKAEKWLFECRNLEEKYESVTKEKERLLAERDSLREANEELRCAQLQPRGLTQADPSLDPTSTPVDNLAAEILPAELRETLLRLQLENKRLCRQEAADRERQEELQRQLEDANRARHGLETQHRLNQQQLSELRAQVEDLQKALQEQGGKTEDVSSILLKRKLEEHLQKLHEADLELQRKREYIEELEPPTDSSTARRIEELQHNLQKKDADLRAMEERYRRYVDKARMVMQTMEPKQRPAAGAPPELHSLRTQLRERDVRIRHLEMDFEKSRSQREQEEKLLISAWYNMGMALQQRAGEERAPAHAQSFLAQQRLATNSRRGPLGRLASLNLRPTDKH

SEQ ID NO: 2127 - protein, 1208 aa, Homo sapiens
MDLHMMNCELLATCSALGYLEGDTYHKEPDCLESVKDLIRYLRHEDETRDVRQQLGAAQILQSDLLPILTQHHQDKPLFDAVIRLMVNLTQPALLCFGNLPKEPSFRHHFLQVLTYLQAYKEAFASEKAFGVLSETLYELLQLGWEERQEEDNLLIERILLLVRNILHVPADLDQEKKIDDDASAHDQLLWAIHLSGLDDLLLFLASSSAEEQWSLHVLEIVSLMFRDQNPEQLAGVGQGRLAQERSADFAELEVLRQREMAEKKTRALQRGNRHSRFGGSYIVQGLKSIGERDLIFHKGLHNLRNYSSDLGKQPKKVPKRRQAARELSIQRRSALNVRLFLRDFCSEFLENCYNRLMGSVKDHLLREKAQQHDETYYMWALAFFMAFNRAASFRPGLVSETLSVRTFHFIEQNLTNYYEMMLTDRKEAASWARRMHLALKAYQELLATVNEMDLSPDEAVRESSRIIKNNIFYVMEYRELFLALFRKFDERCQPRSFLRDLVETTHLFLKMLERFCRSRGNLVVQNKQKKRRKKKKKVLDQAIVSGNVPSSPEEVEAVWPALAEQLQCCAQNSELSMDSVVPFDAASEVPVEEQRAEAMVRIQDCLLAGQAPQALTLLRSAREVWPEGDVFGSQDISPEEEIQLLKQILSAPLPRQQGPEERGAEEEEEEEEEEEEELQVVQVSEKEFNFLDYLKRFACSTVVRAYVLLLRSYQQNSAHTNHCIVKMLHRLAHDLKMEALLFQLSVFCLFNRLLSDPAAGAYKELVTFAKYILGKFFALAAVNQKAFVELLFWKNTAVVREMTEGYGSLDDRSSSRRAPTWSPEEEAHLQELYLANKDVEGQDVVEAILAHLNTVPRTRKQIIHHLVQMGLADSVKDFQRKGTHIVLWTGDQELELQRLFEEFRDSDDVLGHIMKNITAKRSRARIVDKLLALGLVAERRELYKKRQKKLASSILPNGAESLKDFCQEDLEEEENLPEEDSEEEEEGGSEAEQVQGSLVLSNENLGQSLHQEGFSIPLLWLQNCLIRAADDRQEDGCSQAVPLKPLPEENEEAMENEQFQQLLRKLGVRPPASGQETFWRIPAKLSPTQLRRAAASLSQPEEEQKLQPELQPKVPGEQGSDEEHCKEHRAQALRALLLAHKKKAGLASPEEEDAVGKEPLKAAPKKRQLLDSDEEQEEDEGRNRAPELGAPGIQKKKRYQIEDDEDD

SEQ ID NO: 2128 - protein, 353 aa, Homo sapiens
MLQLFIGTADDRLLRPHAFYQVHRITGKTVSTTSHEAILSNTKVLEIPLLPENSMRAVIDCAGILKLRNSDIELRKGETDIGRKNTRVRLVFRVHVPQPSGRTLSLQVASNPIECSQRSAQELPLVEKQSTDSYPVVGGKKMVLSGHNFLQDSKVIFVEKAPDGHHVWEMEAKTDRDLCKPNSLVVEIPPFRNQRITSPVHVSFYVCNGKRKRSQYQRFTYLPANVPIIKTEPTDDYEPAPTCGPVSQGLSPLPRPYYSQQLAMPPDPSSCLVAGFPPGPQRSTLMPAAPGVSPKLHDLSPAAYTKGVASPGHCHLGLPQPAGEAPAVQDVPRPVATHPGSPGQPPPALLPQQ

SEQ ID NO: 2129 - protein, 431 aa, Homo sapiens
MSWVQATLLARGLCRAWGGTCGAALTGTSISQVPRRLPRGLHCSAAAHSSEQSLVPSPPEPRQRPTKALVPFEDLFGQAPGGERDKASFLQTVQKFAEHSVRKRGHIDFIYLALRKMREYGVERDLAVYNQLLNIFPKEVFRPRNIIQRIFVHYPRQQECGIAVLEQMENHGVMPNKETEFLLIQIFGRKSYPMLKLVRLKLWFPRFMNVNPFPVPRDLPQDPVELAMFGLRHMEPDLSARVTIYQVPLPKDSTGAADPPQPHIVGIQSPDQQAALARHNPARPVFVEGPFSLWLRNKCVYYHILRADLLPPEEREVEETPEEWNLYYPMQLDLEYVRSGWDNYEFDINEVEEGPVFAMCMAGAHDQATMAKWIQGLQETNPTLAQIPVVFRLAGSTRELQTSSAGLEEPPLPEDHQEEDDNLQRQQQGQS

SEQ ID NO: 2130 - protein, 2701 aa, Homo sapiens
MTEKMSSFLYIGDIVSLYAEGSVNGFISTLGLVDDRCVVHPEAGDLANPPKKFRDCLFKVCPMNRYSAQKQYWKAKQAKQGNHTEAALLKKLQHAAELEQKQNESENKKLLGEIVKYSNVIQLLHIKSNKYLTVNKRLPALLEKNAMRVSLDAAGNEGSWFYIHPFWKLRSEGDNIVVGDKVVLMPVNAGQPLHASNIELLDNPGCKEVNAVNCNTSWKITLFMKYSSYREDVLKGGDVVRLFHAEQEKFLTCDEYEKKQHIFLRTTLRQSATSATSSKALWEIEVVHHDPCRGGAGQWNSLFRFKHLATGNYLAAELNPDYRDAQNEGKNVRDGVPPTSKKKRQAGEKIMYTLVSVPHGNDIASLFELDATTLQRADCLVPRNSYVRLRHLCTNTWVTSTSIPIDTDEERPVMLKIGTCQTKEDKEAFAIVSVPLSEVRDLDFANDANKVLATTVKKLENGTITQNERRFVTKLLEDLIFFVADVPNNGQEVLDVVITKPNRERQKLMREQNILAQVFGILKAPFKEKAGEGSMLRLEDLGDQRYAPYKYMLRLCYRVLRHSQQDYRKNQEYIAKNFCVMQSQIGYDILAEDTITALLHNNRKLLEKHITAKEIETFVSLLRRNREPRFLDYLSDLCVSNTTAIPVTQELICKFMLSPGNADILIQTKVVSMQADNPMESSILSDDIDDEEVWLYWIDSNKEPHGKAIRHLAQEAKEGTKADLEVLTYYRYQLNLFARMCLDRQYLAINQISTQLSVDLILRCVSDESLPFDLRASFCRLMLHMHVDRDPQESVVPVRYARLWTEIPTKITIHEYDSITDSSRNDMKRKFALTMEFVEEYLKEVVNQPFPFGDKEKNKLTFEVVHLARNLIYFGFYSFSELLRLTRTLLAILDIVQAPMSSYFERLSKFQDGGNNVMRTIHGVGEMMTQMVLSRGSIFPMSVPDVPPSIHPSKQGSPTEHEDVTVMDTKLKIIEILQFILSVRLDYRISYMLSIYKKEFGEDNDNAETSASGSPDTLLPSAIVPDIDEIAAQAETMFAGRKEKNPVQLDDEGGRTFLRVLIHLIMHDYPPLLSGALQLLFKHFSQRAEVLQAFKQVQLLVSNQDVDNYKQIKADLDQLRLTVEKSELWVEKSSNYENGEIGESQVKGGEEPIEESNILSPVQDGTKKPQIDSNKSNNYRIVKEILIRLSKLCVQNKKCRNQHQRLLKNMGAHSVVLDLLQIPYEKNDEKMNEVMNLAHTFLQNFCRGNPQNQVLLHKHLNLFLTPGLLEAETMRHIFMNNYHLCNEISERVVQHFVHCIETHGRHVEYLRFLQTIVKADGKYVKKCQDMVMTELINGGEDVLIFYNDRASFPILLHMMCSERDRGDESGPLAYHITLVELLAACTEGKNVYTEIKCNSLLPLDDIVRVVTHDDCIPEVKIAYVNFVNHCYVDTEVEMKEIYTSNHIWKLFENFLVDMARVCNTTTDRKHADIFLEKCVTESIMNIVSGFFNSPFSDNSTSLQTHQPVFIQLLQSAFRIYNCTWPNPAQKASVESCIRTLAEVAKNRGIAIPVDLDSQVNTLFMKSHSNMVQRAAMGWRLSARSGPRFKEALGGPAWDYRNIIEKLQDVVASLEHQFSPMMQAEFSVLVDVLYSPELLFPEGSDARIRCGAFMSKLINHTKKLMEKEEKLCIKILQTLREMLEKKDSFVEEGNTLRKILLNRYFKGDYSIGVNGHLSGAYSKTAQVGGSFSGQDSDKMGISMSDIQCLLDKEGASELVIDVIVNTKNDRIFSEGIFLGIALLEGGNTQTQYSFYQQLHEQKKSEKFFKVLYDRMKAAQKEIRSTVTVNTIDLGNKKRDDDNELMTSGPRMRVRDSTLHLKEGMKGQLTEASSATSKAYCVYRREMDPEIDIMCTGPEAGNTEEKSAEEVTMSPAIAIMQPILRFLQLLCENHNRELQNFLRNQNNKTNYNLVCETLQFLDCICGSTTGGLGLLGLYINEKNVALVNQNLESLTEYCQGPCHENQTCIATHESNGIDIIIALILNDINPLGKYRMDLVLQLKNNASKLLLAIMESRHDSENAERILFNMRPRELVDVMKNAYNQGLECDHGDDEGGDDGVSPKDVGHNIYILAHQLARHNKLLQQMLKPGSDPDEGDEALKYYANHTAQIEIVRHDRTMEQIVFPVPNICEYLTRESKCRVFNTTERDEQGSKVNDFFQQTEDLYNEMKWQKKIRNNPALFWFSRHISLWGSISFNLAVFINLAVALFYPFGDDGDEGTLSPLFSVLLWIAVAICTSMLFFFSKPVGIRPFLVSIMLRSIYTIGLGPTLILLGAANLCNKIVFLVSFVGNRGTFTRGYRAVILDMAFLYHVAYVLVCMLGLFVHEFFYSFLLFDLVYREETLLNVIKSVTRNGRSIILTAVLALILVYLFSIIGFLFLKDDFTMEVDRLKNRTPVTGSHQVPTMTLTTMMEACAKENCSPTIPASNTADEEYEDGIERTCDTLLMCIVTVLNQGLRNGGGVGDVLRRPSKDEPLFAARVVYDLLFYFIVIIIVLNLIFGVIIDTFADLRSEKQKKEEILKTTCFICGLERDKFDNKTVSFEEHIKSEHNMWHYLYFIVLVKVKDPTEYTGPESYVAQMIVEKNLDWFPRMRAMSLVSNEGDSEQNEIRSLQEKLESTMSLVKQLSGQLAELKEQMTEQRKNKQRLGFLGSNTPHVNHHMPPH

SEQ ID NO: 2131 - protein, 205 aa, Homo sapiens [sequence omitted]

SEQ ID NO: 2132 - protein, 444 aa, Homo sapiens
MREIVHIQAGQCGNQIGAKFWEVISDEHGIDPTGTYHGDSDLQLDRISVYYNEATGGKYVPRAILVDLEPGTMDSVRSGPFGQIFRPDNFVFGQSGAGNNWAKGHYTEGAELVDSVLDVVRKEAESCDCLQGFQLTHSLGGGTGSGMGTLLISKIREEYPDRIMNTFSVVPSPKVSDTVVEPYNATLSVHQLVENTDETYCIDNEALYDICFRTLKLTTPTYGDLNHLVSATMSGVTTCLRFPGQLNADLRKLAVNMVPFPRLHFFMPGFAPLTSRGSQQYRALTVPELTQQVFDAKNMMAACDPRHGRYLTVAAVFRGRMSMKEVDEQMLNVQNKNSSYFVEWIPNNVKTAVCDIPPRGLKMAVTFIGNSTAIQELFKRISEQFTAMFRRKAFLHWYTGEGMDEMEFTEAESNMNDLVSEYQQYQDATAEEEEDFGEEAEEEA

SEQ ID NO: 2133 - protein, 609 aa, Homo sapiens; identical to SEQ ID NO: 566

SEQ ID NO: 2134 - protein, 271 aa, Homo sapiens
MRPVVLVGPSLKGYEVTDMMQKALFDFLKHRFDGRISITRVTADLSLAKRSVLNNPGKRTIIERSSARSSIAEVQSEIERIFELAKSLQLVVLDADTINHPAQLAKTSLAPIIVFVKVSSPKVLQRLIRSRGKSQMKHLTVQMMAYDKLVQCPPESFDVILDENQLEDACEHLAEYLEVYWRATHHPAPGPGLLGPPSAIPGLQNQQLLGERGEEHSPLERDSLMPSDEASETPAKPGQDLHSVLPPPGGGLCRCLPGPVPASPPTHLGAA

SEQ ID NO: 2135 - protein, 1997 aa, Homo sapiens
MLSHGAGLALWITLSLLQTGLAEPERCNFTLAESKASSHSVSIQWRILGSPCNFSLIYSSDTLGAALCPTFRIDNTTYGCNLQDLQAGTIYNFRIISLDEERTVVLQTDPLPPARFGVSKEKTTSTSLHVWWTPSSGKVTSYEVQLFDENNQKIQGVQIQESTSWNEYTFFNLTAGSKYNIAITAVSGGKRSFSVYTNGSTVPSPVKDIGISTKANSLLISWSHGSGNVERYRLMLMDKGILVHGGVVDKHATSYAFHGLTPGYLYNLTVMTEAAGLQNYRWKLVRTAPMEVSNLKVTNDGSLTSLKVKWQRPPGNVDSYNITLSHKGTIKESRVLAPWITETHFKELVPGRLYQVTVSCVSGELSAQKMAVGRTFPDKVANLEANNNGRMRSLVVSWSPPAGDWEQYRILLFNDSVVLLNITVGKEETQYVMDDTGLVPGRQYEVEVIVESGNLKNSERCQGRTVPLAVLQLRVKHANETSLSIMWQTPVAEWEKYIISLADRDLLLIHKSLSKDAKEFTFTDLVPGRKYMATVTSISGDLKNSSSVKGRTVPAQVTDLHVANQGMTSSLFTNWTQAQGDVEFYQVLLIHENVVIKNESISSETSRYSFHSLKSGSLYSVVVTTVSGGISSRQVVVEGRTVPSSVSGVTVNNSGRNDYLSVSWLLAPGDVDNYEVTLSHDGKVVQSLVIAKSVRECSFSSLTPGRLYTVTITTRSGKYENHSFSQERTVPDKVQGVSVSNSARSDYLRVSWVHATGDFDHYEVTIKNKNNFIQTKSIPKSENECVFVQLVPGRLYSVTVTTKSGQYEANEQGNGRTIPEPVKDLTLRNRSTEDLHVTWSGANGDVDQYEIQLLFNDMKVFPPFHLVNTATEYRFTSLTPGRQYKILVLTISGDVQQSAFIEGFTVPSAVKNIHISPNGATDSLTVNWTPGGGDVDSYTVSAFRHSQKVDSQTIPKHVFEHTFHRLEAGEQYQIMIASVSGSLKNQINVVGRTVPASVQGVIADNAYSSYSLIVSWQKAAGVAERYDILLLTENGILLRNTSEPATTKQHKFEDLTPGKKYKIQILTVSGGLFSKEAQTEGRTVPAAVTDLRITENSTRHLSFRWTASEGELSWYNIFLYNPDGNLQERAQVDPLVQSFSFQNLLQGRMYKMVIVTHSGELSNESFIFGRTVPASVSHLRGSNRNTTDSLWFNWSPASGDFDFYELILYNPNGTKKENWKDKDLTEWRFQGLVPGRKYVLWVVTHSGDLSNKVTAESRTAPSPPSLMSFADIANTSLAITWKGPPDWTDYNDFELQWLPRDALTVFNPYNNRKSEGRIVYGLRPGRSYQFNVKTVSGDSWKTYSKPIFGSVRTKPDKIQNLHCRPQNSTAIACSWIPPDSDFDGYSIECRKMDTQEVEFSRKLEKEKSLLNIMMLVPHKRYLVSIKVQSAGMTSEVVEDSTITMIDRPPPPPPHIRVNEKDVLISKSSINFTVNCSWFSDTNGAVKYFTVVVREADGSDELKPEQQHPLPSYLEYRHNASIRVYQTNYFASKCAENPNSNSKSFNIKLGAEMESLGGKCDPTQQKFCDGPLKPHTAYRISIRAFTQLFDEDLKEFTKPLYSDTFFSLPITTESEPLFGAIEGVSAGLFLIGMLVAVVALLICRQKVSHGRERPSARLSIRRDRPLSVHLNLGQKGNRKTSCPIKINQFEGHFMKLQADSNYLLSKEYEELKDVGRNQSCDIALLPENRGKNRYNNILPYDATRVKLSNVDDDPCSDYINASYIPGNNFRREYIVTQGPLPGTKDDFWKMVWEQNVHNIVMVTQCVEKGRVKCDHYWPADQDSLYYGDLILQMLSESVLPEWTIREFKICGEEQLDAHRLIRHFHYTVWPDHGVPETTQSLIQFVRTVRDYINRSPGAGPTVVHCSAGVGRTGTFIALDRILQQLDSKDSVDIYGAVHDLRLHRVHMVQTECQYVYLHQCVRDVLRARKLRSEQENPLFPIYENVNPEYHRDPVYSRH

SEQ ID NO: 2136 - protein, 434 aa, Homo sapiens
MELKDLHQPKRKLTPWKHQRLGKVNSEYRAKFLSPAQYLYKAGAWTHVKGNMPNQVKELREKAEFYRKRVQGTHFSRDHLNQILSDSNCCWDVSSTTSSEGTVSSNIRALDLAGDPTSHKTLQKCPSTEPEEKGNIVEEQPQKNTTEKLGVSAPTIPVRRRLAWDTENTSEDVQKQPGEKEEEDDNEEEGDRKTGKQAFMGEQEKLDVREKSKADKMKEGSDSSVSSEKGGRLPTPKLRELGGIQRTHHDLTTPAVGGAVLVSPSKMKPPAPEQRKRMTSQDCLETSKNDFTKKESRAVSLLTSPAAGIKTVDPLPLREDSEDNIHKFAEATLPVSKIPKYPTNPPGQLPSPPHVPSYWHPSRRIQGSLRDPEFQHNVGKARMNNLQLPQHEAFNDEDEDRLSEISARSAASSLRAFQTLARAKKRKENFWGKT

SEQ ID NO: 2137 - protein, 257 aa, Homo sapiens
MEACVSSLLVLALGALSVGSSFGTQIIGGREVIPHSRPYMASLQRNGSHLCGGVLVHPKWVLTAAHCLAQRMAQLRLVLGLHTLDSPGLTFHIKAAIQHPRYKPVPALENDLALLQLDGKVKPSRTIRPLALPSKRQVVAAGTRCSMAGWGLTHQGGRLSRVLRELDLQVLDTRMCNNSRFWNGSLSPSMVCLAADSKDQAPCKGDSGGPLVCGKGRVLARVLSFSSRVCTDIFKPPVATAVAPYVSWIRKVTGRSA

SEQ ID NO: 2138 - protein, 108 aa, Homo sapiens
MADPRVRQIKIKTGVVKRLVKEKVMYEKEAKQQEEKIEKMRAEDGENYDIKKQAEILQESRMMIPDCQRRLEAAYLDLQQILESEKDLEEAEEYKEARLVLDSVKLEA

SEQ ID NO: 2139 - protein, 340 aa, Homo sapiens
MAKWLRDYLSFGGRRPPPQPPTPDYTESDILRAYRAQKNLDFEDPYEDAESRLEPDPAGPGDSKNPGDAKYGSPKHRLIKVEAADMARAKALLGGPGEELEADTEYLDPFDAQPHPAPPDDGYMEPYDAQWVMSELPGRGVQLYDTPYEEQDPETADGPPSGQKPRQSRMPQEDERPADEYDQPWEWKKDHISRAFAVQFDSPEWERTPGSAKELRRPPPRSPQPAERVDPALPLEKQPWFHGPLNRADAESLLSLCKEGSYLVRLSETNPQDCSLSLRSSQGFLHLKFARTRENQVVLGQHSGPFPSVPELVLHYSSRPLPVQGAEHLALLYPVVTQTP

SEQ ID NO: 2140 - protein, 575 aa, Homo sapiens
MSTFRQEDVEDHYEMGEELGSGQFAIVRKCRQKGTGKEYAAKFIKKRRLSSSRRGVSREEIEREVNILREIRHPNIITLHDIFENKTDVVLILELVSGGELFDFLAEKESLTEDEATQFLKQILDGVHYLHSKRIAHFDLKPENIMLLDKNVPNPRIKLIDFGIAHKIEAGNEFKNIFGTPEFVAPEIVNYEPLGLEADMWSIGVITYILLSGASPFLGETKQETLTNISAVNYDFDEEYFSNTSELAKDFIRRLLVKDPKRRMTIAQSLEHSWIKAIRRRNVRGEDSGRKPERAAPEDHASEGVHHQVALQLAAQQQLRRLRALLQGAGGGGGRRGGPARAAAQPAALPRGRGGAGRHLRGEGGLVPRGERQPGPGPAEATAGAAQDRGAQAAGAGGGQGRAAGDQRPQAPLQPPGEPLRGAGQASSLRDALRAGPRARPGAGEAAGRGVRAALGAVGWARPQDSRSSACGGGASCGRCASHRPGACPCPAPPGWRRSGRSWSQARKFAGRGGCGTGLLLYTASTLAFTFTPASSVTLGPSRQRGLWHREGWDPPRRRGGPNAALVQARRRVCG

SEQ ID NO: 2141 - protein, 455 aa, Homo sapiens
MPKEYRCGSWLRCRLQSDPWRAEKQSANLRAERLEKELQSSSEQNTFLINKLHKAEREINTLSSKVKELKHSNKLEITDIKLETARAKSELERERNKIQSELDGLQSDNEILKAAVEHHKVLLVEKDRELIRKVQAAKEEGYQKLVVLQDEKLELENRLADLEKMKVEHDVWRQSEKDQYEEKLRASQMAEEITRKELQSVRLKLQQQIVTIENAEKEKNENSDLKQQISSLQIQVTSLAQSENDLLNSNQMLKEMVERLKQECRNFRSQAEKAQLEAEKTLEEKQIQWLEEKHKLHERITDREEKYNQAKEKLQRAAIAQKKRKSLHENKLKRLQEKVEVLEAKKEELETENQVLNRQNVPFEDYTRLQKRLKDIQRRHNEFRSLILVPNMPPTASINPVSFQSSAMVPSMELPFPPHMQEEQHQRELSLLRKRLEELETTQRKQLEELGSSGE

SEQ ID NO: 2142 - protein, 367 aa, Homo sapiens
MMAQSNMFTVADVLSQDELRKKLYQTFKDRGILDTLKTQLRNQLIHELMHPVLSGELQPRSISVEGSSLLIGASNSLVADHLQRCGYEYSLSVFFPESGLAKEKVFTMQDLLQLIKINPTSSLYKSLVSGSDKENQKGFLMHFLKELAEYHQAKESCNMETQTSSTFNRDSLAEKLQLIDDQFADAYPQRIKFESLEIKLNEYKREIEEQLRAEMCQKLKFFKDTEIAKIKMEAKKKYEKELTMFQNDFEKACQAKSEALVLREKSTLERIHKHQEIETKEIYAQRQLLLKDMDLLRGREAELKQRVEAFELNQKLQEEKHKSITEALRRQEQNIKSFEETYDRKLKNELLNFHRLHGVCLALGILI

SEQ ID NO: 2143 - protein, 594 aa, Homo sapiens
MVSHILQSELGDFHEETDRKHLAQTRYLPNQDCLEGKIMHFHQKHIGRSPAESDILLLDIARKLDMYGIRPHPASDGEGMQIHLAVAHMGVLVLRGNTKINTFNWAKIRKLSFKRKHFLIKLHANILVLCKDTLEFTMASRDACKAFWKTCVEYHAFFRLSEEPKSKPKTLLCSKGSSFRYSGRTQRQLLEYGRKGRLKSLPFERKHYPSQYHERQCRSSPDLLSDVSKQVEDLRLAYGGGYYQNVNGVHASEPVLESRRRNSALEVTFATELEHSKPEADPTLLHQSQSSSSFPFIYMDPVFNTEPNPNPDPRDIFSERSSLSSFQTSCKFSGNHMSIYSGLTSKVRPAKQLTYTDVPYIPCTGQQVGIMPPQVFFYVDKPPQVPRWSPIRAEERTSPHSYVEPTAMKPAERSPRNIRMKSFQQDLQVLQEAIARTSGRSNINVGLEEEDPNLEDAFVCNIQEQTPKRSQSQSDMKTIRFPFGSEFRPLGPCPALSHKADLFTDMFAEQELPAVLMDQSTAERYVASESSDSESEILKPDYYALYGKEIRSPMARIRLSSGSLQLDEEDEDAYFNTPTAEDRTSLKPCNYFLA

SEQ ID NO: 2144 - protein, 397 aa, Homo sapiens
MALLRGVFVVAAKRTPFGAYGGLLKDFTATDLSEFAAKAALSAGKVSPETVDSVIMGNVLQSSSDAIYLARHVGLRVGIPKETPALTINRLCGSGFQSIVNGCQEICVKEAEVVLCGGTESMSQAPYCVRNVRFGTKLGSDIKLEDSLWVSLTDQHVQLPMAMTAENLAVKHKISREECDKYALQSQQRWKAANDAGYFNDEMAPIEVKTKKGKQTMQVDEHARPQTTLEQLQKLPPVFKKDGTVTAGNASGVADGAGAVIIASEDAVKKHNFTPLARIVGYFVSGCDPSIMGIGPVPAISGALKKAGLSLKDMDLVEVNEAFAPQYLAVERSLDLDISKTNVNGGAIALGHPLGGSGSRITAHLVHELRRRGGKYAVGSACIGGGQGIAVIIQSTA

SEQ ID NO: 2145 - protein, 252 aa, Homo sapiens
MAAACRSVKGLVAVITGGASGLGLATAERLVGQGASAVLLDLPNSGGEAQAKKLGNNCVFAPADVTSEKDVQTALALAKGKFGRVDVAVNCAGIAVASKTYNLKKGQTHTLEDFQRVLDVNLMGTFNVIRLVAGEMGQNEPDQGGQRGVIINTASVAAFEGQVGQAAYSASKGGIVGMTLPIARDLAPIGLFGTPLLTSLPEKVCNFLASQVPFPSRLGDPAEYAHLVQAIIENPFLNGEVIRLDGAIRMQP

SEQ ID NO: 2146 - protein, 347 aa, Homo sapiens
MRVVVIGAGVIGLSTALCIHERYHSVLQPLDIKVYADRFTPLTTTDVAAGLWQPYLSDPNNPQEADWSQQTFDYLLSHVHSPNAENLGLFLISGYNLFHEAIPDPSWKDTVLGFRKLTPRELDMFPDYGYGWFHTSLILEGKNYLQWLTERLTERGVKFFQRKVESFEEVAREGADVIVNCTGVWAGALQRDPLLQPGRGQIMKVDAPWMKHFILTHDPERGIYNSPYIIPGTQTVTLGGIFQLGNWSELNNIQDHNTIWEGCCRLEPTLKNARIIGERTGFRPVRPQIRLEREQLRTGPSNTEVIHNYGHGGYGLTIHWGCALEAAKLFVRILEEKKLSRMPPSHL

SEQ ID NO: 2147 - protein, 496 aa, Homo sapiens
MSASEGMKFKFHSGEKVLCFEPDPTKARVLYDAKIVDVIVGKDEKGRKIPEYLIHFNGWNRSWDRWAAEDHVLRDTDENRRLQRKLARKAVARLRSTGRKKKRCRLPGVDSVLKGLPTEEKDENDENSLSSSSDCSENKDEEISEESDIEEKTEVKEEPELQTRREMEERTITIEIPEVLKKQLEDDCYYINRRKRLVKLPCQTNIITILESYVKHFAINAAFSANERPRHHHVMPHANMNVHYIPAEKNVDLCKEMVDGLRITFDYTLPLVLLYPYEQAQYKKVTSSKFFLPIKESATSTNRSQEELSPSPPLLNPSTPQSTESQPTTGEPATPKRRKAEPEALQSLRRSTRHSANCDRLSESSASPQPKRRQQDTSASMPKLFLHLEKKTPVHSRSSSPIPLTPSKEGSAVFAGFEGRRTNEINEVLSWKLVPDNYPPGDQPPPPSYIYGAQHLLRLFVKLPEILGKMSFSEKNLKALLKHFDLFLRVFSRIPR

SEQ ID NO: 2148 - protein, 283 aa, Homo sapiens [sequence omitted]

SEQ ID NO: 2149 - protein, 828 aa, Homo sapiens
  VARIANT 670, 671, 672, 673: Xaa = Any Amino Acid
MLAQESYPKKRNYTMEIVPSASLDTFPSENENFLCDLMDTAVTKKPCSLEIARAPSPRTDNASEVAVTTPGTSNHRNSSTGPTPDCSPPSPDTALKNIVKVIRPQPKQRTSIVSSLDFHRMNHNQEYFEINTSTGCTSFTASPPASPPTSSVGTTEVKNEGTNHTDDLSRQDDNDPPKEYDPGQFAGLLHGSSPACESPENPFHLYGKREQCEKGQDEVSLANSPLPFKQSPIENNSEPLVKKIKPKVVSRTIFHKKSNQLENHTIVGTRSTRSGSRNGDQWVMNAGGFVERACTLGRIRSLPKALIDMHLSKSVSKSDSDLIAYPSNEKTSRVNWSESSTAEHSSKGNSERTPSFTSEWEEIDKIMSSIDVGINNELKEMNGETTRPRCPVQTVGQWLESIGLPQYENHLMANGFDNVQFMGSNVMEDQDLLEIGILNSGHRQRILQAIQLLPKMRPIGHDGYHPTSVAEWLDSIELGDYTKAFLINGYTSMDLLKKIWEVELINVLKINLIGHRKRILASLGDRLHDDPPQKPPRSITLREPSGNHTPPQLSPSLSQSTYTTGGSLDVPHIIMQGDARRRRNENYFDDIPRSKLERQMAQTGDWGEPSITLRPPNEATASTPVQYWQHHPEKLIFQSCDYKAFYLGSMLIKELRGTESTQDACAKMRXXXXKSTEQMKKVPTIILSVSYKGVKFIDATNKNIIAEHEIRNISCAAQDPEDLSTFAYITKDLKSNHHYCHVFTAFDVNLAYEIILTLGQAFEVAYQLALQARKGGHSSTLPESFENKPSKPIPKPRVSIRKSVDLLHASHTGQEPSERHTEEALRKF

SEQ ID NO: 2150 - protein, 415 aa, Homo sapiens
MVFAHRMDNSKPHLIIPTLLVPLQNRSCTETATPLPSQYLMELSEEHSWMSNQTDLHYVLKPGEVATASIFFGILWLFSIFGNSLVCLVIHRSRRTQSTTNYFVVSMACADLLISVASTPFVLLQFTTGRWTLGSATCKVVRYFQYLTPGVQIYVLLSICIDRFYTIVYPLSFKVSREKAKKMIAASWVFDAGFVTPVLFFYGSNWDSHCNYFLPSSWEGTAYTVIHFLVGFVIPSVLIILFYQKVIKYIWRIGTDGRTVRRTMNIVPRTKVKTIKMFLILNLLFLLSWLPFHVAQLWHPHEQDYKKSSLVFTAITWISFSSSASKPTLYSIYNANFRRGMKETFCMSSMKCYRSNAYTITTSSRMAKKNYVGISEIPSMAKTITKDSIYDSFDREAKEKKLAWPINSNPPNTFV

SEQ ID NO: 2151 - protein, 432 aa, Homo sapiens
MAAPMEVAVCTDSAAPMWSCIVWELHSGANLLTYRGGQAGPRGLALLNGEYLLAAQLGKNYISAWELQRKDQLQQKIMCPGPVTCLTASPNGLYVLAGVAESIHLWEVSTGNLLVILSRHYQDVSCLQFTGDSSHFISGGKDCLVLVWSLCSVLQADPSRIPAPRHVWSHHALPITDLHCGFGGPLARVATSSLDQTVKLWEVSSGELLLSVLFDVSIMAVTMDLAEHHMFCGGSEGSIFQVDLFTWPGQRERSFHPEQDAGKVFKGHRNQVTCLSVSTDGSVLLSGSHDETVRLWDVQSKQCIRTVALKGPVTNAAILLAPVSMLSSDFRPSLPLPHFNKHLLGAEHGDEPRHGGLTLRLGLHQQGSEPSYLDRTEQLQAVLCSTMEKSVLGGQDQLRVRVTELEDEVRNLRKINRDLFDFSTRFITRPAK

SEQ ID NO: 2152 - protein, 162 aa, Homo sapiens
MAPIKVGDAIPAVEVFEGEPGNKVNLAELFKGKKGVLFGVPGAFTPGCSKTHLPGFVEQAEALKAKGVQVVACLSVNDAFVTGEWGRAHKAEGKVRLLADPTGAFGKETDLLLDDSLVSIFGNRRLKRFSMVVQDGIVKALNVEPDGTGLTCSLAPNIISQL

SEQ ID NO: 2153 - protein, 1232 aa, Homo sapiens
MKEEVKGIPVRVALRCRPLVPKEISEGCQMCLSFVPGEPQVVVGTDKSFTYDFVFDPSTEQEEVFNTAVAPLIKGVFKGYNATVLAYGQTGSGKTYSMGGAYTAEQENEPTVGVIPRVIQLLFKEIDKKSDFEFTLKVSYLEIYNEEILDLLCPSREKAQINIREDPKEGIKIVGLTEKTVLVALDTVSCLEQGNNSRTVASTAMNSQSSRSHAIFTISLEQRKKSDKNSSFRSKLHLVDLAGSERQKKTKAEGDRLKEGININRGLLCLGNVISALGDDKKGGFVPYRDSKLTRLLQDSLGGNSHTLMIACVSPADSNLEETLNTLRYADRARKIKNKPIVNIDPQTAELNHLKQQVQQLQVLLLQAHGGTLPGSITVEPSENLQSLMEKNQSLVEENEKLSRGLSEAAGQTAQMLERIILTEQANEKMNAKLEELRQHAACKLDLQKLVETLEDQELKENVEIICNLQQLITQLSDETVACMAAAIDTAVEQEAQVETSPETSRSSDAFTTQHALRQAQMSKELVELNKALALKEALARKMTQNDSQLQPIQYQYQDNIKELELEVINLQKEKEELVLELQTAKKDANQAKLSERRRKRLQELEGQIADLKKKLNEQSKLLKLKESTERTVSKLNQEIRMMKNQRVQLMRQMKEDAEKFRQWKQKKDKEVIQLKERDRKRQYELLKLERNFQKQSNVLRRKTEEAAAANKRLKDALQKQREVADKRKETQSRGMEGTAARVKNWLGNEIEVMVSTEEAKRHLNDLLEDRKILAQDVAQLKEKKESGENPPPKLRRRTFSLTEVRGQVSESEDSITKQIESLETEMEFRSAQIADLQQKLLDAESEDRPKQRWENIATILEAKCALKYLIGELVSSKIQVSKLESSLKQSKTSCADMQKMLFEERNHFAEIETELQAELVRMEQQHQEKVLYLLSQLQQSQMAEKQLEESVSEKEQQLLSTLKCQDEELEKMREVCEQNQQLLRENEIIKQKLTLLQVASRQKHLPKDTLLSPDSSFEYVPPKPKPSRVKEKFLEQSMDIEDLKYCSEHSVNEHEDGDGDDDEGDDEEWKPTKLVKVSRKNIQGCSCKGWCGNKQCGCRKQKSDCGVDCCCDPTKCRNRQQGKDSLGTVERTQDSEGSFKLEDPTEVTPGLSFFNPVCATPNSKILKEMCDVEQVLSKKTPPAPSPFDLPELKHVATEYQENKAPGKKKKRALASNTSFFSGCSPIEEEAH

SEQ ID NO: 2154 - protein, 1139 aa, Homo sapiens
  VARIANT 422, 423, 424, 425, 426, 427, 428, 429, 430, 431: Xaa = Any Amino Acid
MMNHVYRERFPKATAQMEGRLQEFLTAYAPGARLALADGVLGFIHHQIVELARDCLAKSGENLVTSRYFLEMQEKLERLLQDAHERSDSEEVSFIVQLVRKLLIIISRPARLLECLEFDPEEFYHLLEAAEGHAREGQGIKTDLPQYIIGQLGLAKDPLEEMVPLSHLEEEQPPAPESPESRALVGQSRRKPCESDFETIKLISNGAYGAVYLVRHRDTRQRFAIKKINKQNLILRNQIQQVFVERDILTFAENPFVVSMFCSFETRRHLCMVMEYVEGGDCATLLKNMGPLPVDMARLYFAETVLALEYLHNYGIVHRDLKPDNLLITSLGHIKLTDFGLSKIGLMSMATNLYEGHIEKDAREFIDKQVCGTPEYIAPEVIFRQGYGKPVDWWAMGVVLYEFLVGCVPFFGDTPEELFGQXXXXXXXXXXGDEALPADAQDLITRLLRQSPLDRLGTGGTHEVKQHPFFLALDWAGLLRHKAEFVPQLEAEDDTSYFDTRSERYRHLGSEDDETNDEESSTEIPQFSSCSHRFSKVYSSSEFLAVQPTPTFAERSFSEDREEGWERSEVDYGRRLSADIRLRSWTSSGSSCQSSSSQPERGPSPSLLNTISLDTMPKFAFSSEDEGVGPGPAGPKRPVFILGEPDPPPAATPVMPKPSSLSADTAALSHARLRSNSIGARHSTPRPLDAGRGRRLGGPRDPAPEKSRASSSGGSGGGSGGRVPKSASVSALSLIITADDGSGGPLMSPLSPRSLSSNPSSRDSSPSRDPSPVCGSLRPPIVIHSSGKKYGFSLRAIRVYMGDSDVYTVHHVVWSVEDGSPAQEAGLRAGDLITHINGESVLGLVHMDVVELLLKSGNKISLRTTALENTSIKVGPARKNVAKGRMARRSKRSRRRETQDRRKSLFKKISKQTSVLHTSRSFSSGLHHSLSSSESLPGSPTHSLSPSPTTPCRSPAPDVPADTTASPPSASPSSSSPASPAAAGHTRPSSLHGLAAKLGPPRPKTGRRKSTSSIPPSPLACPPISAPPPRSPSPLPGHPPAPARSPRLRRGQSADKLGTGERLDGEAGRRTRGPEAELVVMRRLHLSERRDSFKKQEAVQEVSFDEPQEEATGLPTSVPQIAVEGEEAVPVALGPTGRD

SEQ ID NO: 2155 - protein, 966 aa, Homo sapiens
MCPLAHPAQDLPLLPSQLSLDPSGPEWDCPLGSKDLEEEGPWGGGSGLPPTGCFPGSWRQDVGLDCKGSPEGAEARAWTVYYYSLLQSCLQQAGLPETQDRGQVPRTGCPGAEVTLCVLGSPSTFLPVLLEGGVQSPGNMLLCLSPAWLMKVPAPGQPGEAALLVSKAVSFHPGGLTFLDDFVPPRRATYFLAGLGLGPGRGREAAELARDLTCPTGASAELARLLEDRLLTRQLLAQQGGVAVPATLAFTYKPPGLLRGGDASLGLRLVELSGKEGQETLVKEEVEAFLRSEALGDILQVAVKLSGWRWRGRQAWRLHPRAELGAVVDTVLALLEKLEEEESVLVEAVYPPAQLPCSDGPSPGPGLAVRICAVVCRTQGDRPLLSKVVCGVGRGDRPLRHHNSLPRTLEVALAQCGLGEEAQVAAVRQRVKAAAEAALAAVLALEAGLSAEQRGGRRAHTDFLGVDFALTAAGGVLTPVALELNGGLCLEACGALEGLWAAPRLGPAADEAVAAPLVETMLRRSARCLMEGKQLLVVGAGGVSKKFVWEAARDYGLQLHLVESDPNHFASQLVQTFIHFDMTEHRRDEENARLLAELVRARGLKLDGCFSYWDDCLVLTALLCQELGLPCSSPAAMRLAKQKSLTQLHLLHHHGPPWPAPSLHAVPCCPLESEADVERAVHQVPLPGVMKLEFGAGAVGVRLVEDAPQCHEHFSRITRDLQGEADHPGIGLGWGNAMLLMEFVEGTEHDVDLVLFGGRLLAAFVSDNGPTRLPGFTETAACMPTGLAPEQEAQMVQAAFRCCLGCGLLDGVFNVELKLTGAGPRLIEINPRMGGFYLRDWILELYGVDLLLAAVMVACGLRPALPTRPRARGHLVGVMCLVSQHLQALSSTASRETLQALHDRGLLRLNLLEEALVPGEYEEPYCSVACAGPSPTEARLRLLGLCQGLGIDGPSYPVAHFLSHFK

SEQ ID NO: 2156 - protein, 210 aa, Homo sapiens
  VARIANT 13, 14, 15, 16, 17: Xaa = Any Amino Acid
MPPYTVVYFPVRXXXXXLRMLLADQGQSWKEEVVTVETWQEGSLKASCLYGQLPKFQDGDLTLYQSNTILRHLGRTLGLYGKDQQEAALVDMVNDGVEDLRCKYISLIYTNYEAGKDDYVKALPGQLKPFETLLSQNQGGKTFIVGDQISFADYNLLDLLLIHEVLAPGCLDAFPLLSAYVGRLSARPKLKAFLASPEYVNLPINGNGKQ

SEQ ID NO: 2157 - protein, 563 aa, Homo sapiens
MIKRRAHPGAGGDRTRPRRRRSTESWIERCLNESENKRYSSHTSLGNVSNDENEEKENNRASKPHSTPATLQWLEENYEIAEGVCIPRSALYMHYLDFCEKNDTQPVNAASFGKIIRQQFPQLTTRRLGTRGQSKYHYYGIAVKESSQYYDVMYSKKGAAWVSETGKKEVSKQTVAYSPRSKLGTLLPEFPNVKDLNLPASLPEEKVSTFIMMYRTHCQRILDTVIRANFDEVQSFLLHFWQGMPPHMLPVLGSSTVVNIVGVCDSILYKAISGVLMPTVLQALPDSLTQVIRKFAKQLDEWLKVALHDLPENLRNIKFELSRRFSQILRRQTSLNHLCQASRTVIHSADITFQMLEDWRNVDLNSITKQTLYTMEDSRDEHRKLITQLYQEFDHLLEEQSPIESYIEWLDTMVDRCVVKVAAKRQGSLKKVAQQFLLMWSCFGTRVIRDMTLHSAPSFGSFHLIHLMFDDYVLYLLESLHCQERANELMRAMKGEGSTAEVREEIILTEAAAPTPSPVPSFSPAKSATSVEVPPPSSPVSNPSPEYTGLSTTGNGKSFKNFG

SEQ ID NO: 2158 - protein, 602 aa, Homo sapiens
MPSAKQRGSKGGHGAASPSEKGAHPSGGADDVAKKPPPAPQQPPPPPAPHPQQHPQQHPQNQAHGKGGHRGGGGGGGKSSSSSSASAAAAAAAASSSASCSRRLGRALNFLFYLALVAAAAFSGWCVHHVLEEVQQVRRSHQDFSRQREELGQGLQGVEQKVQSLQATFGTFESILRSSQHKQDLTEKAVKQGESEVSRISEVLQKLQNEILKDLSDGIHVVKDARERDFTSLENTVEERLTELTKSINDNIAIFTEVQKRSQKEINDMKAKVASLEESEGNKQDLKALKEAVKEIQTSAKSREWDMEALRSTLQTMESDIYTEVRELVSLKQEQQAFKEAADTERLALQALTEKLLRSEESVSRLPEEIRRLEEELRQLKSDSHGPKEDGGFRHSEAFEALQQKSQGLDSRLQHVEDGVLSMQVASARQTESLESLLSKSQEHEQRLAALQGRLEGLGSSEADQDGLASTVRSLGETQLVLYGDVEELKRSVGELPSTVESLQKVQEQVHTLLSQDQAQAARLPPQDFLDRLSSLDNLKASVSQVEADLKMLRTAVDSLVAYSVKIETNENNLESAKGLLDDLRNDLDRLFVKVEKIHEKV

SEQ ID NO: 2159 - protein, 289 aa, Homo sapiens
MAQNLKDLAGRLPAGPRGMGTALKLLLGAGAVAYGVRESVFTVEGGHRAIFFNRIGGVQQDTILAEGLHFRIPWFQYPIIYDIRARPRKISSPTGSKDLQMVNISLRVLSRPNAQELPSMYQRLGLDYEERVLPSIVNEVLKSVVAKFNASQLITQRAQVSLLIRRELTERAKDFSLILDDVAITELSFSREYTAAVEAKQVAQQEAQRAQFLVEKAKQEQRQKIVQAEGEAEAAKMLGEALSKNPGYIKLRKIRAAQNISKTIATSQNRIYLTADNLVLNLQDESFTR

SEQ ID NO: 2160 - protein, 706 aa, Homo sapiens [sequence omitted]

SEQ ID NO: 2161 - protein, 122 aa, Homo sapiens
MTSPEIASLSWGQMKVKGSNTTYKDCKVWPGGSRTWDWRETGTEHSPGVQPADVKEVVEKGVQTLVIGRGMSEALKVPSSTVEYLKKHGIDVRVLQTEQAVKEYNALVAQGVRVGGVFHSTC

SEQ ID NO: 2162 - protein, 424 aa, Homo sapiens [sequence omitted]

SEQ ID NO: 2163 - protein, 720 aa, Homo sapiens
MVGAKDQAVFKCEVSDENVRGVWLKNGKELVPDSRIKVSHIGRVHKLTIDDVTPADEADYSFVPEGFACNLSAKLHFMEVKIDFVPRQEPPKIHLDCPGRIPDTIVVVAGNKLRLDVPISGDPAPTVIWQKAITQGNKAPARPAPDAPEDTGDSDEWVFDKKLLCETEGRVRVETTKDRSIFTVEGAEKEDEGVYTVTVKNPVGEDQVNLTVKVIDVPDAPAAPKISNVGEDSCTVQWEPPAYDGGQPILGYILERKKKKSYRWMRLNFDLIQELSHEARRMIEGVVYEMRVYAVNAIGMSRPSPASQPFMPIGPPSEPTHLAVEDVSDTTVSLKWRPPERVGAGGLDGYSVEYCPEGCSEWVAALQGLTEHTSILVKDLPTGARLLFRVRAHNMAGPGAPVTTTEPVTVQEILQRPRLQLPRHLRQTIQKKVGEPVNLLIPFQGKPRPQVTWTKEGQPLAGEEVSIRNSPTDTILFIRAARRVHSGTYQVTVRIENMEDKATLVLQVVDKPSPPQDLRVTDAWGLNVALEWKPPQDVGNTELWGYTVQKADKKTMEWFTVLEHYRRTHCVVPELIIGNGYYFRVFSQNMVGFSDRAATTKEPVFIPRPGITYEPPNYKALDFSEAPSFTQPLVNRSVIAGYTAMLCCAVRGSPKPKISWFKNGLDLGEDARFRMFSKQGVLTLEIRKPCPFDGGIYVCRATNLQGEARCECRLEVRVPQ

SEQ ID NO: 2164 - protein, 1042 aa, Homo sapiens; identical to SEQ ID NO: 29

SEQ ID NO: 2165 - protein, 613 aa, Homo sapiens
MAAQAAAAAQAAAAQAAQAEAADSWYLALLGFAEHFRTSSPPKIRLCVHCLQAVFPFKPPQRIEARTHLQLGSVLYHHTKNSEQARSHLEKAWLISQQIPQFEDVKFEAASLLSELYCQENSVDAAKPLLRKAIQISQQTPYWHCRLLFQLAQLHTLEKDLVSACDLLGVGAEYARVVGSEYTRALFLLSKGMLLLMERKLQEVHPLLTLCGQIVENWQGNPIQKESLRVFFLVLQVTHYLDAGQVKSVKPCLKQLQQCIQTISTLHDDEILPSNPADLFHWLPKEHMCVLVYLVTVMHSMQAGYLEKAQKYTDKALMQLEKLKMLDCSPILSSFQVILLEHIIMCRLVTGHKATALQEISQVCQLCQQSPRLFSNHAAQLHTLLGLYCVSVNCMDNAEAQFTTALRLTNHQELWAFIVTNLASVYIREGNRHQEVLYSLLERINPDHSFPVSSHCLRAAAFYVRGLFSFFQGRYNEAKRFLRETLKMSNAEDLNRLTACSLVLLGHIFYVLGNHRESNNMVVPAMQLASKIPDMSVQLWSSALLRDLNKACGNAMDAHEAAQMHQNFSQQLLQDHIEACSLPEHNLITWTDGPPPVQFQAQNGPNTSLASLL

SEQ ID NO: 2166 - protein, 595 aa, Homo sapiens
MPACCSCSDVFQYETNKVTRIQSMNYGTIKWFFHVIIFSYVCFALVSDKLYQRKEPVISSVHTKVKGIAEVKEEIVENGVKKLVHSVFDTADYTFPLQGNSFFVMTNFLKTEGQEQRLCPEYPTRRTLCSSDRGCKKGWMDPQSKGIQTGRCVVYEGNQKTCEVSAWCPIEAVEEAPRPALLNSAENFTVLIKNNIDFPGHNYTTRNILPGLNITCTFHKTQNPQCPIFRLGDIFRETGDNFSDVAIQGGIMGIEIYWDCNLDRWFHHCRPKYSFRRLDDKTTNVSLYPGYNFRYAKYYKENNVEKRTLIKVFGIRFDILVFGTGGKFDIIQLVVYIGSTLSYFGLAAVFIDFLIDTYSSNCCRSHIYPWCKCCQPCVVNEYYYRKKCESIVEPKPTLKYVSFVDESHIRMVNQQLLGRSLQDVKGQEVPRPAMDFTDLSRLPLALHDTPPIPGQPEEIQLLRKEATPRSRDSPVWCQCGSCLPSQLPESHRCLEELCCRKKPGACITTSELFRKLVLSRHVLQFLLLYQEPLLALDVDSTNSRLRHCAYRCYATWRFGSQDMADFANLPSCCRWRIRKEFPKSEGQYSGFKSPY

SEQ ID NO: 2167 - protein, 268 aa, Homo sapiens
MEALPLLAATTPDHGRHRRLLLLPLLLFLLPAGAVQGWETEERPRTREEECHFYAGGQVYPGEASRVSVADHSLHLSKAKISKPAPYWEGTAVIDGEFKELKLTDYRGKYLVFFFYPLDFTFVCPTEIIAFGDRLEEFRSINTEVVACSVDSQFTHLAWINTPRRQGGLGPIRIPLLSDLTHQISKDYGVYLEDSGHTLRGLFIIDDKGILRQITLNDLPVGRSVDETLRLVQAFQYTDKHGEVCPAGWKPGSETDNPRSSWKAEVFR

SEQ ID NO: 2168 - protein, 113 aa, Homo sapiens
MASATRLIQRLRNWASGHDLQGKLQLRYQEISKRTQPPPKLPVGPSHKLSNNYYCTRDGRRESVPPSIIMSSQKALVSGKPAESSAVAATEKKAVTPAPPIKRWELSSDQPYL

SEQ ID NO: 2169 - protein, 309 aa, Homo sapiens
MADGQHEGCLPRLTGLGIDITHAEESLDHSHVLLFLPHRGECSQHEGRVAGSVLAVDLAGPRIQEQACDGQVPVGHTVVQGRVPVAIRQVHHVRQQFGSQAPHPFQHPGHGLRLRAPLAGHSKPLLGHEAHCAAVAGYSAGPAQLPLQRYARLPQTRAQLAPPLCHLLRLCLRLGLRVPDVPAAGRARGARVGSPAAVIPGARGATRGLGATVLAVAIAVAGVLAGGALVLSVEDPNKLQALGSGAGLGTRCAVSLLHDGFEDARGRHGPVSVHGSGRALLSQGGRLCRGLGLRGLFGTAPRGLGGGLA

SEQ ID NO: 2170 - protein, 196 aa, Homo sapiens
MPVYCGNEVTPTEAAQAPEVTYEAEEGSLWTLLLTSLDGHLLEPDAEYLHWLLTNIPGNRVAEGQVTCPYLPPFPARGSGIHRLAFLLFKQDQPIDFSEDARPSPCYQLAQRTFRTFDFYKKHQETMTPAGLSFFQCRWDDSVTYIFHQLLDMREPVFEFVRPPPYHPKQKRFPHRQPLRYLDRYRDSHEPTYGIY

SEQ ID NO: 2171 - protein, 346 aa, Homo sapiens
MKDLDGMDADILGLKKSNSAPSKKAAKDPGKGELPNHPKPAGGAIPTKKSLPSPSSSGHQNRRFSSEDLEDPLRGLLSYDEGGITKQPPVTQSKTASDKSPSTVRDQGPSIPLTPGDTPIRKKEELLFDDGDDIMATLGFGDSPKAEKRQIGDQEGPRPARSTLDELLGRGMATKLLARPGTGEHREFKLDKKYQRPQAVKICGVTRTSPLEPISPLWSPLRAGSPAGSLSVGSSQTVAQTPRENQAPNRALQWLPAPSSPGREELTGWASRTRTWTCSLPHPPERPIGKVQCLSRPQCLLLRASTPRQLGCPPPGQSHQLKVQGPLPKPARLPSCEPPRRRKRTG

SEQ ID NO: 2172 - protein, 600 aa, Homo sapiens
MRSCLWRCRHLSQGVQWSLLLAVLVFFLFALPSFIKEPQTKPSRHQRTENIKERSLQSLAKPKSQAPTRARRTTIYAEPVPENNALNTQTQPKAHTTGDRGKEANQAPPEEQDKVPHTAQRAAWKSPEKEKTMVNTLSPRGQDAGMASGRTEAQSWKSQDTKTTQGNGGQTRKLTASRTVSEKHQGKAATTAKTLIPKSQHRMLAPTGAVSTRTRQKGVTTAVIPPKEKKPQATPPPAPFQSPTTQRNQRLKAANFKSEPRWDFEEKYSFEIGGLQTTCPDSVKIKASKSLWLQKLFLPNLTLFLDSRHFNQSEWDRLEHFAPPFGFMELNYSLVQKVVTRFPPVPQQQLLLASLPAGSLRCITCAVVGNGGILNNSHMGQEIDSHDYVFRLSGALIKGYEQDVGTRTSFYGFTAFSLTQSLLILGNRGFKNVPLGKDVRYLHFLEGTRDYEWLEALLMNQTVMSKNLFWFRHRPQEAFREALHMDRYLLLHPDFLRYMKNRFLRSKTLDGAHWRIYRPTTGALLLLTALQLCDQVSAYGFITEGHERFSDHYYDTSWKRLIFYINHDFKLEREVWKRLHDEGIIRLYQRPGPGTAKAKN

SEQ ID NO: 2173 - protein, 1857 aa, Homo sapiens
MEQLTTLPRPGDPGAMEPWALPTWHSWTPGRGGEPSSAAPSIADTPPAALQLQELRSEESSKPKGDGSSRPVGGTDPEGAEACLPSLGQQASSSGPACQRPEDEEVEAFLKAKLNMSFGDRPNLELLRALGELRQRCAILKEENQMLRKSSFPETEEKVRRLKRKNAELAVIAKRLEERARKLQETNLRVVSAPLPRPGTSLELCRKALARQRARDLSETASALLAKDKQIAALQRECRELQARLTLVGKEGPQWLHVRDFDRLLRESQREVLRLQRQIALRNQRETLPLPPSWPPGPALQARAGAPAPGAPGEATPQEDADNLPVILGEPEKEQRVQQLESELSKKRKKCESLEQEARKKQRRCEELELQLRQAQNENARLVEENSRLSGRATEKEQVEWENAELRGQLLGVTQERDSALRKSQGLQSKLESLEQVLKHMREVAQRRQQLEVEHEQARLSLREKQEEVRRLQQAQAEAQREHEGAVQLLESTLDSMQARVRELEEQCRSQTEQFSLLAQELQAFRLHPGPLDLLTSALDCGSLGDCPPPPCCCSIPQPCRGSGPKDLDLPPGSPGRCTPKSSEPAPATLTGVPRRTAKKAESLSNSSHSESIHNSPKSCPTPEVDTASEVEELEADSVSLLPAAPEGSRGGARIQVFLARYSYNPFEGPNENPEAELPLTAGEYIYIYGNMDEDGFFEGELMDGRRGLVPSNFVERVSDDDLLTSLPPELADLSHSSGPELSFLSVGGGGSSSGGQSSVGRSQPRPEEEDAGDELSLSPSPEGLGEPPAVPYPRRLVVLKQLAHSVVLAWEPPPEQVELHGFHICVNGELRQALGPGAPPKAVLENLDLWAGPLHISVQALTSRGSSDPLRCCLAVGARAGVVPSQLRVHRLTATSAEITWVPGNSNLAHAIYLNGEECPPASPSTYWATFCHLRPGTPYQAQVEAQLPPQGPWEPGWERLEQRAATLQFTTLPAGPPDAPLDVQIEPGPSPGILIISWLPVTIDAAGTSNGVRVTGYAIYADGQKIMEVASPTAGSVLVELSQLQLLQVCREVVVRTMSPHGESADSIPAPITPALAPASLPARVSCPSPHPSPEARAPLASASPGPGDPSSPLQHPAPLGTQEPPGAPPASPSREMAKGSHEDPPAPCSQEEAGAAVLGTSEERTASTSTLGEKDPGPAAPSLAKQEAEWTAGEACPASSSTQGARAQQAPNTEMCQGGDPGSGLRPRAEKEDTAELGVHLVNSLVDHGRNSDLSDIQEEEEEEEEEEEEELGSRTCSFQKQVAGNSIRENGAKSQPDPFCETDSDEEILEQILELPLQQFCSKKLFSIPEEEEEEEEDEEEEKSGAGCSSRDPGPPEPALLGLGCDSGQPRRPGQCPLSPESSRAGDCLEDMPGLVGGSSRRRGGGSPEKPPSRRRPPDPREHCSRLLSNNGPQASGRLGPTRERGGLPVIEGPRTGLEASGRGRLGPSRRCSRGRALEPGLASCLSPKCLEISIEYDSEDEQEAGSGGISITSSCYPGDGEAWGTATVGRPRGPPKANSGPKPYPRLPAWEKGEPERRGRSATGRAKEPLSRATETGEARGQDGSGRRGPQKRGVRVLRPSTAELVPARSPSETLAYQHLPVRIFVALFDYDPVSMSPNPDAGEEELPFREGQILKVFGDKDADGFYQGEGGGRTGYIPCNMVAEVAVDSPAGRQQLLQRGYLSPDILLEGSGNGPFVYSTAHTTGPPPKPRRSKKAESEGPAQPCPGPPKLVPSADLKAPHSMVAAFDYNPQESSPNMDVEAELPFRAGDVITVFGGMDDDGFYYGELNGQRGLVPSNFLEGPGPEAGGLDREPRTPQAESQRTRRRRVQC

SEQ ID NO: 2174 - protein, 1203 aa, Homo sapiens
  VARIANT 1085, 1086, 1087, 1088, 1089, 1090, 1091, 1092, 1093, 1094,1095, 1096, 1097, 1098, 1099, 1100, 1101, 1102, 1103, 1104,1105, 1106, 1107, 1108, 1109, 1110, 1111, 1112, 1113, 1114,1115, 1116, 1117, 1118, 1119, 1120: Xaa = Any Amino Acid
MGGHSYGLGHPALHQNLPPGFPASVAGPVPSVFPLPQDAPTQLVILPSEPTPHSAPHALADVMDQASLWPPMYGGRGPASHMQHPGQLPVYSRPQLLRQQELYALQQQRAAQFQRKPEDQHLDLEEPAQEKAPKSTHKPVALTPTAPGAPSPAAGPTKLPPCCHPPDPKPPASSPTPPPRPSAPCTLNVCPASSPGPGSRVRSAEEKNGEGQQSTADIITSEPVARAHSVAHAGLEFLASNDPSTSASQSFGITDLPPGYLRPMAGLGFSLPSDVHSSNLEDPETMQTTAPGAQPEPTRTFLPGEPPPCSPRSLEEPGLLSGAREATQDLAATPYPAERGPQGKAADPSPLEGLQELQCAALLEAGGPEATGQAHSTQGGAREERSREEGEQGPSSGASSQVLEQRAGSPGALEDEGEQPAPEEDELEEDELGQQSMEDSEEDCGGAPDNSHPPRALPGLDALVAATINLGDLPSDSPPDPQPPAASGPPSTVPLPHSSGIHGIALLSELADLAIQRQRSERTVPEEEEDVLSFNLQHLATLATAWSLVEAAGLDSSTAPAQPPTANPCSGPRLTPRMQILQRKDTWTPKTKPVCPLKAAIDQLDTQEVGMRVRLAELQRRYKEKQRELARLQRKHDHERDESSRSPARRGPGRPRKRKHSSSLPAPRPTGPLPRSDGKKVKAVRTSLGLLCAELRGGSGGEPAKKRSKLERSVYAGLQTASVEKAQCKKSSCQGGLAPSVAHRVAQLKPKVKSKGLPTGLSSFQQKEATPGGRIREKLSRAKSAKVSGATRHPQPKGHGSRETPRCPAQPSVAASQEAGSGYDSEDCEGLLGTEAPPREAGLLLHAGASVAVLGPSPSSVVKMEANHQAEKKKERQGLLGACRLSSPESEVKIKRRSVKAKVGTTLERAPGQRPPGALGKKKAKGKAKGSLRAEPGATPSRDALFNPSRAFACREEGSQLASERLKRATRKGTVLQPVLRRKNGALSITLATRNAKAILGKGRKLSKVKHKAGKQGKGRAVSRLLESFAVEEDFEFDDNSSFSEEEEDEEEEEEDSGPLSAEQSAALARSCAIHKEDLRDGLPXXXXXXXXXXXXXXXXXXXXXXXXXXXXXXXXXXXXRIYSLNQLLQEAVLDVRPQSSRYLPPGTRVCAYWSQKSRCLYPGNVVRGASGDEDEDLDSVVVEFDDGDTGHIAVSRRQAAAP

SEQ ID NO: 2175 - protein, 851 aa, Homo sapiens [sequence omitted]

SEQ ID NO: 2176 - protein, 918 aa, Homo sapiens
MNENMRATLATSKNVFQLKLEETQKLLEDQHLSNLQKFGDEVNQITNSETLSSIDSLEATEHEEIYLTLNKEHSTSIQRNTISLKPANMQSTNLSCFDEDKLAFSKTQHINNWLTNLDASNTQNVTAFSDILSKSNVLPSWEYFNSKEQNPSPLNGTVERATNTANNSVPFVSSPPMFVLDKKCEKTSETSTMRTTDSTSGAFKRERPLVTESPTFKFSKSQSTSDSLTQEVATFPDQEKYSELNQENGTTSIPTSCVPVATPLVLPSNIQSARPSAKNSIHIKEIDAVQCSDKLDELKDGKEEEIKYFNCNKEELPLFSDSFQDAYIPHNPDSKDEKQKLAETSSLSNVTSNYDFVGQHKKMKYNIHERNGVRFLKSILKKESKYEHGYLKALIINQSFKFGNQKAAAIRDSIELTKEKGAEIPKTIKKLRWFDETSNIENNAENSHSLKNKTGTTQQHSQQFHIQSGAGSNIISVSTCAVNSADTKKSREDSISENVTTLGGSGADHMPLNCFIPSGYNFAKHAWPASKKEESKIPVHDDSKTKQGKPQRGRAKIIRKPGSAKVQSGFICTNRKGAVIQPQSASKVNIFTQAQGKLIIPCPPPQSTSNIRSGKNIQVSQCQPVTPENPQNIITHNSFNSKHVLPTEHSLNQWNQESSSPLSNACSDLVTVIPSLPSYCSSECQTFAKINHSNGTQAVARQDATLYCTQRSPVCEESYPSVTLRTAEEESVPLWKRGPNVLHQNKRATGSTVMRRKRIAETKRRNILEQKRQNPGSVGQKYSEQINNFGQSVLLSSSEPKQTTRGTSYIEEVSDSTSEFLMAENLVKASVPEDEILTVLNSKQIQKSNLPLNKTQQFNICTLSAEEQKILESLNDLSERLHYIQESICKNPSIKNTLQIIPLLEKREDRTSSCRDKR

SEQ ID NO: 2177 - protein, 1191 aa, Homo sapiens
MEAMSPQQETLGGQPGRSSSLTGVSRLAGGSCTKKKMKTLAERRRSAPSLILDKALQKRPTTRDSPSASVDTCTFLSSLVCSNRTLLIDGRAELKRGLQRQERHLFLFNDLFVVAKIKYNNNFKIKNKIKLTDMWTASCVDEVGEGNTNAMKSFVLGWPTVNFVATFSSPEQKDKWLSLLQRYINLEKEKDYPKSIPLKIFAKDIGNCAYSKTITVMNSDTANEVINMSLPMLGITGSERDYQLWVNSGKEEAPYPLIGHEYPYGIKMSHLRDSALLTPGSKDSTTPFNLQEPFLMEQLPREMQCQFILKPSRLAAAQQLSDSGHKTFKRRRSIINWAFWRGSSTHLDNLPSSPTSPMPGQLFGISLPNICENDNLPKPVLDMLFFLNQKGPLTKGIFRQSANVKSCRELKEKLNSGVEVHLDCESIFVIASVLKDFLRNIPGSIFSSDLYDHWVSVMDQGNDEEKINTVQRLLDQLPRANVVLLRYLFGVLHNIEQHSSSNQMTAFNLAVCVAPSILWPPASSSPELENEFTKKVSLLIQFLIENCLRIFGEEITSLFREVSVRCDTRENASDISCFQLNDSSYDSLENELNEDVDAPCSDLVKKLGQGSRSMDSVLTLSDYDLDQPEVEGLLTLSDFDLAHSKDEDVQMKRPLESKPVNILVYTKIPLRDHARAPSAMCTPSYLSTAAANAAKSLRRHRRCSEPSIDYLDSKLSYLREFYQKKLRKSSCDAILSQKDEDYLKQNQPLQEEGKTCFKQSLVTGTDVSKKNATTQNTKKKSLSGSEGNHVKLFPKSKPVAISVASYSPMSSQDHSKNQPFDVNTSGYSPPHTADALKGPRTHRRCSEPNIEDQNRKLTYLRGIYSKKQHKTSCEAGLLHGEEDYLKRHKSLQMEGQKLINQSLVMGIEVGKSSATNQNTEKVLPPRLNLCPRTSYSSLSSPGTSPSGSSVSSQDSAFSQISEHSVFTPTETSSPIDCTFQAQRKREDLSPDFSNASHVSGMPGPSSGQACSRPAYTKKDTMEWHSQMHSVTLHPSTWLRNGVASLKNWSLKKKAKAARPEEEKIASPKGPLEPPPHASGVPEANSLQEEQKDLPLRAAEGLSPVQSAQRCSSSPFQDSERHCSSPFSLVESRLKLCMKSHEEIEPGSQSSSGSLPWERASASSWTLEDATSPDSGPTVVCDIEDRYLTKDI

SEQ ID NO: 2178 - protein, 790 aa, Homo sapiens
MSSKAEKKQRLSGRGSSQASWSGRATRAAVATQEQGNAPAVSEPELQAELPKEEPEPRLEGPQAQSEESVEPEADVKPLFLSRAALTGLADAVWTQEHDAILEHFAQDPTESILTIFIDPCFGLKLELGMPVQTQNQLVYFIRQAPVPITWENFEATVQFGTVRGPYIPALLRLLGGVFAPQIFANTGWPESIRNHFASHLHKFLACLTDTRYKLEGHTVLYIPAEAMNMKPEMVIKDKELVQRLETSMIHWTRQIKEMLSAQETVETGENLGPLEEIEFWRNRCMDLSGISKQLVKKGVKHVESILHLAKSSYLAPFMKLAQQIQDGSRQAQSNLTFLSILKEPYQELAFMKPKDISSKLPKLISLIRIIWVNSPHYNTRERLTSLFRKVCDCQYHFARWEDGKQGPLPCFFGAQGPQITRNLLEIEDIFHKNLHTLRAVRGGILDVKNTCWHEDYNKFRAGIKDLEVMTQNLITSAFELVRDVPHGVLLLDTFHRLASREAIKRTYDKKAVDLYMLFNSELALVNRERNKKWPDLEPYVAQYSGKARWVHILRRRIDRVMTCLAGAHFLPRIGTGKESVHTYQQMVQAIDELVRKTFQEWTSSLDKDCIRRLDTPLLRISQEKAGMLDVNFDKYRSHLAPFPYTPLLQLSQEFHSHLLTPLFIILSLSHTICLLSSFYFFFSSFIFVSPHLPPCYQHFNFTTYLKTQQNKTMIGQARWLTPVIPALWEAEVGASLEPRSLRTAWATWQNPVSAKNTKISWAWWHKPVVSATWEGEVGGSPEPGRQRLQ

SEQ ID NO: 2179 - protein, 206 aa, Homo sapiens
MAAGESMAQRMVWVDLEMTGLDIEKDQIIEMACLITDSDLNILAEGPNLIIKQPDELLDSMSDWCKEHHGKQSGLTKAVKESTITLQQAEYEFLSFVRQQTPPGLCPLAGNSVHEDKKFLDKYMPQFMKHLHYRIIDVSTVKELCRRWYPEEYEFAPKKAASHRALDDISESIKELQFYRNNIFKKKIDEKKRKIIENGENEKTVS

SEQ ID NO: 2180 - protein, 1313 aa, Homo sapiens
MDSSVSPAATTACVPYAPSRPPGLPGTTTSSSSSSSSNTGLRGVEPNPGIPGADHYQTPALEVSHHGRLGPSAHSSRKPFLGAPAATPHLSLPPGPSSPPPPPCPRLLRPPPPPAWLKGPACRAAREDGEILEELFFGTEGPPRPAPPPLPHREGFLGPPASRFSVGTQDSHTPPTPPTPTTSSSNSNSGSHSSSPAGPVSFPPPPYLARSIDPLPRPPSPAQNPQDPPLVPLTLALPPAPPSSCHQNTSGSFRRPESPRPRVSFPKTPEVGPGPPPGPLSKAPQPVPPGVGELPARGPRLFDFPPTPLEDQFEEPAEFKILPDGLANIMKMLDESIRKEEEQQQHEAGVAPQPPLKEPFASLQSPFPTDTAPTTTAPAVAVTTTTTTTTTTTATQEEEKKPPPALPPPPPLAKFPPPSQPQPPPPPPPSPASLLKSLASVLEGQKYCYRGTGAAVSTRPGPLPTTQYSPGPPSGATALPPTSAAPSAQGSPQPSASSSSQFSTSGGPWARERRAGEEPVPGPMTPTQPPPPLSLPPARSESEVLEEISRACETLVERVGRSATDPADPVDTAEPADSGTERLLPPAQAKEEAGGVAAVSGSCKRRQKEHQKEHRRHRRACKDSVGRRPREGRAKAKAKVPKEKSRRVLGNLDLQSEEIQGREKSRPDLGGASKAKPPTAPAPPSAPAPSAQPTPPSASVPGKKAREEAPGPPGVSRADMLKLRSLSEGPPKELKIRLIKVESGDKETFIASEVEERRLRMADLTISHCAADVVRASRNAKVKGKFRESYLSPAQSVKPKINTEEKLPREKLNPPTPSIYLESKRDAFSPVLLQFCTDPRNPITVIRGLAGSLRLNLGLFSTKTLVEASGEHTVEVRTQVQQPSDENWDLTGTRQIWPCESSRSHTTIAKYAQYQASSFQESLQEEKESEDEESEEPDSTTGTPPSSAPDPKNHHIIKFGTNIDLSDAKRWKPQLQELLKLPAFMRVTSTGNMLSHVGHTILGMNTVQLYMKVPGSRTPGHQENNNFCSVNINIGPGDCEWFAVHEHYWETISAFCDRHGVDYLTGSWWPILDDLYASNIPVYRFVQRPGDLVWINAGTVHWVQATGWCNNIAWNVGPLTAYQYQLALERYEWNEVKNVKSIVPMIHVSWNVARTVKISDPDLFKMIKFCLLQSMKHCQVQRESLVRAGKKIAYQGRVKDEPAYYCNECDVEVFNILFVTSENGSRNTYLVHCEGCARRRSAGLQGVVVLEQYRTEELAQAYDAFTLVRARRARGQRRRALGQAAGTGFGSPAAPFPEPPPAFSPQAPASTSR

SEQ ID NO: 2181 - protein, 1101 aa, Homo sapiens
MVALLLEFGANVDASSESGLTPLGYAAAAGYLSIVVLLCKKRAKVDHLDKNGQCALVHAALRGHLEVVKFLIQCDWTMAGQQQGVFKKSHAIQQALIAAASMGYTEIVSYLLDLPEKDEEEVERAQINSFDSLWGETALTAAAGRGKLEVCRLLLEQGAAVAQPNRRGAVPLFSTVRQGHWQIVDLLLTHGADVNMADKQGRTPLMMAASEGHLGTVDFLLAQGASIALMDKEGLTALSWACLKGHLSVVRSLVDNGAATDHADKNGRTPLDLAAFYGDAEVVQFLVDHGAMIEHVDYSGMRPLDRAVGCRNTSVVVTLLKKGAKIGCQTLPSRPRGPATWAMATSKPDIMIILLSKLMEEGDMFYKKGKVKEAAQRYQYALKKFPREGFGEDLKTFRELKVSLLLNLSRCRRKMNDFGMAEEFATKALELKPKSYEAYYARARAKRSSRQFAAALEDLNEAIKLCPNNREIQRLLLRVEEECRQMQQPQQPPPPPQPQQQLPEEAEPEPQHEDIYSVQDIFEEEYLEQDVENVSIGLQTEARPSQGLPVIQSPPSSPPHRDSAYISSSPLGSHQVFDFRSSSSVGSPTRQTYQSTSPALSPTHQNSHYRPSPPHTSPAHQGGSYRFSPPPVGGQGKEYPSPPPSPLRRGPQYRASPPAESMSVYRSQSGSPVRYQQETSVSQLPGRPKSPLSKMAQRPYQMPQLPVAVPQQGLRLQPAKAQIVRSNQPSPAVHSSTVIPTGAYGQVAHSMASKYQSSQGDIGVSQSRLVYQGSIGGIVGDGRPVQHVQASLSAGAICQHGGLTKEDLPQRPSSAYRGGVRYSQTPQIGRSQSASYYPVCHSKLDLERSSSQLGSPDVSHLIRRPISVNPNEIKPHPPTPRPLLHSQSVGLRFSPSSNSISSTSNLTPTFRPSSSIQQMEIPLKPAYERSCDELSPVSPTQGGYPSEPTRSRTTPFMGIIDKTARTQQYPHLHQQNRTWAVSSVDTVLSPTSPGNLPQPESFSPPSSISNIAFYNKTNNAQNGHLLEDDYYSPHGMLANGSRGDLLERVSQASSYPDVKVARTLPVAQAYQDNLYRQLSRDSRQGQTSPIKPKRPFVESNV

SEQ ID NO: 2182 - protein, 818 aa, Homo sapiens
  VARIANT 10, 11, 13, 80, 814: Xaa = Any Amino Acid
MNRSGRTSRXXAXCAGSSELCAPWALPTLPLAKRQQYNALLSNMSRIYSTAKVCLPNKTATCWSLDPDLTNILASSRTTXMLLFAWEGWHNAAGIPLKPLYEDFTALSNEAYKQDGFTDTGAYWRSWYNSPTFEDDLEHLYQQLEPLYLNLHAFVRRALHRRYGDRYINLRGPIPAHLLGDMWAQSWENIYDMVVPFPDKPNLDVTSTMLQQGWNATHMFRVAEEFFTSLELSPMPPEFWEGSMLEKPADGREVVCHASAWDFYNRKDFRIKQCTRVTMDQLSTVHHEMGHIQYYLQYKDLPVSLRRGANPGFHEAIGDVLALSVSTPEHLHKIGLLDRVTNDTESDINYLLKMALEKIAFLPFGYLVDQWRWGVFSGRTPPSRYNFDWWYLRTKYQGICPPVTRNETHFDAGAKFHVPNVTPYIRYFVSFVLQFQFHEALCKEAGYEGPLHQCDIYRSTKAGAKLRKVLQAGSSRPWQEVLKDMVGLDALDAQPLLKYFQPVTQWLQEQNQQNGEVLGWPEYQWHPPLPDNYPEGIDLVTDEAEASKFVEEYDRTSQVVWNEYAEANWNYNTNITTETSKILLQKNMQIANHTLKYGTQARKFDVNQLQNTTIKRIIKKVQDLERAALPAQELEEYNKILLDMETTYSVATVCHPNGSCLQLEPDLTNVMATSRKYEDLLWAWEGWRDKAGRAILQFYPKYVELINQAARLNGYVDAGDSWRSMYETPSLEQDLERLFQELQPLYLNLHAYVRRALHRHYGAQHINLEGPIPAHLLGNMWAQTWSNIYDLVVPFPSAPSMDTTEAMLKQGWTXQEDV

SEQ ID NO: 2183 - protein, 297 aa, Homo sapiens
MSAWAAASLSRAAARCLLARGPGVRAAPPRDPRPSHPEPRGCGAAPGRTLHFTAAVPAGHNKWSKVRHIKGPKDVERSRIFSKLCLNIRLAVKEGGPNPEHNSNLANILEVCRSKHMPKSTIETALKMEKSKDTYLLYEGRGPGGSSLLIEALSNSSHKCQADIRHILNKNGGVMAVGARHSFDKKGVIVVEVEDREKKAVNLERALEMAIEAGAEDVKETEDEEERNVFKFICDASSLHQVRKKLDSLGLCSVSCALEFIPNSKVQLAEPDLEQAAHLIQALSNHEDVIHVYDNIE

SEQ ID NO: 2184 - protein, 345 aa, Homo sapiens
MISPVLILFSSFLCHVAIAGRTCPKPDDLPFSTVVPLKTFYEPGEEITYSCKPGYVSRGGMRKFICPLTGLWPINTLKCTPRVCPFAGILENGAVRYTTFEYPNTISFSCNTGFYLNGADSAKCTEEGKWSPELPVCAPIICPPPSIPTFATLRVYKPSAGNNSLYRDTAVFECLPQHAMFGNDTITCTTHGNWTKLPECREVKCPFPSRPDNGFVNYPAKPTLYYKDKATFGCHDGYSLDGPEEIECTKLGNWSAMPSCKASCKVPVKKATVVYQGERVKIQEKFKNGMLHGDKVSFFCKNKEKKCSYTEDAQCIDGTIEVPKCFKEHSSLAFWKTDASDVKPC

SEQ ID NO: 2185 - protein, 504 aa, Homo sapiens
MEPAGPAPGRLGPLLCLLLAASCAWSGVAGEEELQVIQPDKSVLVAAGETATLRCTATSLIPVGPIQWFRGAGPGRELIYNQKEGHFPRVTTVSDLTKRNNMDFSIRIGNITPADAGTYYCVKFRKGSPDDVEFKSGAGTELSVRAKPSAPVVSGPAARATPQHTVSFTCESHGFSPRDITLKWFKNGNELSDFQTNVDPVGESVSYSIHSTAKVVLTREDVHSQVICEVAHVTLQGDPLRGTANLSETIRVPPTLEVTQQPVRAENQVNVTCQVRKFYPQRLQLTWLENGNVSRTETASTVTENKDGTYNWMSWLLVNVSAHRDDVKLTCQVEHDGQPAVSKSHDLKVSAHPKEQGSNTAAENTGSNERNIYIVVGVVCTLLVALLMAALYLVRIRQKKAQGSTSSTRLHEPEKNAREITQDTNDITYADLNLPKGKKPAPQAAEPNNHTEYASIQTSPQPASEDTLTYADLDMVHLNRTPKQPAPKPEPSFSEYASVQVPRK

SEQ ID NO: 2186 - protein, 385 aa, Homo sapiens
MAALSGVRWLTRALVSAGNPGAWRGLSTSAAAHAASRSQAEDVRVEGSFPVTMLPGDGVGPELMHAVKEVFKAAAVPVEFQEHHLSEVQNMASEEKLEQVLSSMKENKVAIIGKIHTPMEYKGELASYDMRLRRKLDLFANVVHVKSLPGYMTRHNNLDLVIIREQTEGEYSSLEHESARGVIECLKIVTRAKSQRIAKFAFDYATKKGRGKVTAVHKANIMKLGDGLFLQCCEEVAELYPKIKFETMIIDNCCMQLVQNPYQFDVLVMPNLYGNIIDNLAAGLVGGAGVVPGESYSAEYAVFETGARHPFAQAVGRNIANPTAMLLSASNMLRHLNLEYHSSMIADAVKKVIKVGKVRTRDMGGYSTTTDFIKSVIGHLQTKGS

SEQ ID NO: 2187 - protein, 597 aa, Homo sapiens
MALNSPQPGPVESELGKQLLKTGWEGSPLPRSPTQDAAGVGPPASQGRGPAGEPMGPEAGSKAELPPTVSRPPLLRGLSWDSGPEEPGPRLQKVLAKLPLAEEEKRFAGKAGGKLAKAPGLKDFQIQVQPVRMQKLTKLREEHILMRNQNLVGLKLPDLSEAAEQEKGLPSELSPAIEEEESKSGLDVMPNISDVLLRKLRVHRSLPGSAPPLTEKEVENVFVQLSLAFRNDSYTLESRINQAERERNLTEENTEKELENFKASITSSASLWHHCEHRETYQKLLEDIAVLHRLAARLSSRAEVVGAVRQEKRMSKATEVMMQYVENLKRTYEKDHAELMEFKKLANQNSSRSCGPSEDGVPRTARSMSLTLGKNMPRRRVSVAVVPKFNALNLPGQTPSSSSIPSLPALSESPNGKGSLPVTSALPALLENGKTNGDPDCEASAPALTLSCLEELSQETKARMEEEAYSKGFQEGLKKTKELQDLKEEEEEQKSESPEEPEEVEETEEEEKGPRSSKLEELVHFLQVMYPKLCQHWQVIWMMAAVMLVLTVVLGLYNSYNSCAEQADGPLGRSTCSAAQRDSWWSSGLQHEQPTEQ

SEQ ID NO: 2188 - protein, 1939 aa, Homo sapiens
MSSDSEMAIFGEAAPFLRKSERERIEAQNKPFDAKTSVFVVDPKESFVKATVQSREGGKVTAKTEAGATVTVKDDQVFPMNPPKYDKIEDMAMMTHLHEPAVLYNLKERYAAWMIYTYSGLFCVTVNPYKWLPVYNAEVVTAYRGKKRQEAPPHIFSISDNAYQFMLTDRENQSILITGESGAGKTVNTKRVIQYFATIAVTGEKKKEEVTSGKMQGTLEDQIISANPLLEAFGNAKTVRNDNSSRFGKFIRIHFGTTGKLASADIETYLLEKSRVTFQLKAERSYHIFYQIMSNKKPDLIEMLLITTNPYDYAFVSQGEITVPSIDDQEELMATDSAIEILGFTSDERVSIYKLTGAVMHYGNMKFKQKQREEQAEPDGTEVADKAAYLQNLNSADLLKALCYPRVKVGNEYVTKGQTVQQVYNAVGALAKAVYDKMFLWMVTRINQQLDTKQPRQYFIGVLDIAGFEIFDFNSLEQLCINFTNEKLQQFFNHHMFVLEQEEYKKEGIEWTFIDFGMDLAACIELIEKPMGIFSILEEECMFPKATDTSFKNKLYEQHLGKSNNFQKPKPAKGKPEAHFSLIHYAGTVDYNIAGWLDKNKDPLNETVVGLYQKSAMKTLALLFVGATGAEAEAGGGKKGGKKKGSSFQTVSALFRENLNKLMTNLRSTHPHFVRCIIPNETKTPGAMEHELVLHQLRCNGVLEGIRICRKGFPSRILYADFKQRYKVLNASAIPEGQFIDSKKASEKLLGSIDIDHTQYKFGHTKVFFKAGLLGLLEEMRDEKLAQLITRTQAMCRGFLARVEYQKMVERRESIFCIQYNVRAFMNVKHWPWMKLYFKIKPLLKSAETEKEMANMKEEFEKTKEELAKTEAKRKELEEKMVTLMQEKNDLQLQVQAEADSLADAEERCDQLIKTKIQLEAKIKEVTERAEDEEEINAELTAKKRKLEDECSELKKDIDDLELTLAKVEKEKHATENKVKNLTEEMAGLDETIAKLTKEKKALQEAHQQTLDDLQAEEDKVNTLTKAKIKLEQQVDDLEGSLEQEKKIRMDLERAKRKLEGDLKLAQESTMDIENDKQQLDEKLKKKEFEMSGLQSKIEDEQALGMQLQKKIKELQARIEELEEEIEAERASRAKAEKQRSDLSRELEEISERLEEAGGATSAQIEMNKKREAEFQKMRRDLEEATLQHEATAATLRKKHADSVAELGEQIDNLQRVKQKLEKEKSEMKMEIDDLASNMETVSKAKGNLEKMCRALEDQLSEIKTKEEEQQRLINDLTAQRARLQTESGEYSRQLDEKDTLVSQLSRGKQAFTQQIEELKRQLEEEIKAKSALAHALQSSRHDCDLLREQYEEEQEAKAELQRAMSKANSEVAQWRTKYETDAIQRTEELEEAKKKLAQRLQDAEEHVEAVNAKCASLEKTKQRLQNEVEDLMIDVERTNAACAALDKKQRNFDKILAEWKQKCEETHAELEASQKESRSLSTELFKIKNAYEESLDQLETLKRENKNLQQEISDLTEQIAEGGKRIHELEKIKKQVEQEKSELQAALEEAEASLEHEEGKILRIQLELNQVKSEVDRKIAEKDEEIDQMKRNHIRIVESMQSTLDAEIRSRNDAIRLKKKMEGDLNEMEIQLNHANRMAAEALRNYRNTQAILKDTQLHLDDALRSQEDLKEQLAMVERRANLLQAEIEELRATLEQTERSRKIAEQELLDASERVQLLHTQNTSLINTKKKLETDISQIQGEMEDIIQEARNAEEKAKKAITDAAMMAEELKKEQDTSAHLERMKKNLEQTVKDLQHRLDEAEQLALKGGKKQIQKLEARVRELEGEVESEQKRNVEAVKGLRKHERKVKELTYQTEEDRKNILRLQDLVDKLQAKVKSYKRQAEEAEEQSNVNLSKFRRIQHELEEAEERADIAESQVNKLRVKSREVHTKIISEE

SEQ ID NO: 2189 - protein, 360 aa, Homo sapiens
  VARIANT 193, 194, 195, 196, 197: Xaa = Any Amino Acid
MRATPLAAPAGSLSRKKRLELDDNLDTERPVQKRARSGPQPRLPPCLLPLSPPTAPDRATAVATASRLGPYVLLEPEEGGRAYQALHCPTGTEYTCKVYPVQEALAVLEPYARLPPHKHVARPTEVLAGTQLLYAFFTRTHGDMHSLVRSRHRIPEPEAAVLFRQMATALAHCHQHGLVLRDLKLCRFVFADXXXXXKKLVLENLEDSCVLTGPDDSLWDKHACPAYVGPEILSSRASYSGKAADVWSLGVALFTMLAGHYPFQDSEPVLLFGKIRRGAYALPAGLSAPARCLVRCLLRREPAERLTATGILLHPWLRQDPMPLAPTRSHLWEAAQVVPDGLGLDEAREEEGDREVVLYG

SEQ ID NO: 2190 - protein, 863 aa, Homo sapiens
MAKPLTDSEKRKQISVRGLAGLGDVAEVRKSFNRHLHFTLVKDRNVATPRDYFFALAHTVRDHLVGRWIRTQQHYYERDPKRIYYLSLEFYMGRTLQNTMVNLGLQNACDEAIYQLGLDLEELEEIEEDAGLGNGGLGRLAACFLDSMATLGLAAYGYGIRYEFGIFNQKIVNGWQVEEADDWLRYGNPWEKARPEYMLPVHFYGRVEHTPDGVKWLDTQVVLAMPYDTPVPGYKNNTVNTMRLWSAKAPNDFKLQDFNVGDYIEAVLDRNLAENISRVLYPNDNFFEGKELRLKQEYFVVAATLQDIIRRFKSSKFGCRDPVRTCFETFPDKVAIQLNDTHPALSIPELMRILVDVEKVDWDKAWEITKKTCAYTNHTVLPEALERWPVSMFEKLLPRHLEIIYAINQRHLDHVAALFPGDVDRLRRMSVIEEGDCKRINMAHLCVIGSHAVNGVARIHSEIVKQSVFKDFYELEPEKFQNKTNGITPRRWLLLCNPGLADTIVEKIGEEFLTDLSQLKKLLPLVSDEVFIRDVAKVKQENKLKFSAFLEKEYKVKINPSSMFDVHVKRIHEYKRQLLNCLHVVTLYNRIKRDPAKAFVPRTVMIGGKAAPGYHMAKLIIKLVTSIGDVVNHDPVVGDRLKVIFLENYRVSLAEKVIPAADLSQQISTAGTEASGTGNMKFMLNGALTIGTMDGANVEMAEEAGAENLFIFGLRVEDVEALDRKGYNAREYYDHLPELKQAVDQISSGFFSPKEPDCFKDIVNMLMHHDRFKVFADYEAYMQCQAQVDQLYRNPKEWTKKVIRNIACSGKFSSDRTITEYAREIWGVEPSDLQLQHLPHPEWESGGATCWAPPELCTHLAMY

SEQ ID NO: 2191 - protein, 727 aa, Homo sapiens
MNGEADCPTDLEMAAPKGQDRWSQEDMLTLLECMKNNLPSNDSSKFKTTESHMDWEKVAFKDFSGDMCKLKWVEISNEVRKFRTLTELILDAQEHVKNPYKGKKLKKHPDFPKKPLTPYFRFFMEKRAKYAKLHPEMSNLDLTKILSKKYKELPEKKKMKYIQDFQREKQEFERNLARFREDHPDLIQNAKKSDIPEKPKTPQQLWYTHEKKVYLKVRPDEIMRDYIQKHPELNISEEGITKSTLTKAERQLKDKFDGRPTKPPPNSYSLYCAELMANMKDVPSTERMVLCSQQWKLLSQKEKDAYHKKCDQKKKDYEVELLRFLESLPEEEQQRVLGEEKMLNINKKQATSPASKKPAQEGGKGGSEKPKRPVSAMFIFSEEKRRQLQEERPELSESELTRLLARMWNDLSEKKKAKYKAREAALKAQSERKPGGEREERGKLPESPKRAEEIWQQSVIGDYLARFKNDRVKALKAMEMTWNNMEKKEKLMWIKKAAEDQKRYERELSEMRAPPAATNSSKKMKFQGEPKKPPMNGYQKFSQELLSNGELNHLPLKERMVEIGSRWQRISQSQKEHYKKLAEEQQKQYKVHLDLWVKSLSPQDRAAYKEYISNKRKSMTKLRGPNPKSSRTTLQSKSESEEDDEEDEDDEDEDEEEEDDENGDSSEDGGDSSESSSEDESEDGDENEEDDEDEDDDEDDDEDEDNESEGSSSSSSSSGDSSDSDSN

SEQ ID NO: 2192 - protein, 442 aa, Homo sapiens
MKIRAENKWLQMLPTTRAAWKMAVCLVAGKTPCPSTLSLRGGSVRHAGIASLSCFTCMMTMAISLTALCAARAESCCFAATRAAAGVSVWSAWRCWWAQAQRPRPSFRSPGAVTCVSRSAVMASCGAGRTGTCACRPSSPVTRGLNMEAPKLYPAIPAARRRPIRVLSLFDGIATGYLVLKELGIKVGKYVASEVCEESIAVGTVKHEGNIKYVNDVRNITKKNIEEWGPFDLVIGGSPCNDLSNVNPARKGLYEGTGRLFFEFYHLLNYSRPKEGDDRPFFWMFENVVAMKVGDKRDISRFLECNPVMIDAIKVSAAHRARYFWGNLPGMNRPVIASKNDKLELQDCLEYNRIAKLKKVQTITTKSNSIKQGKNQLFPVVMNGKEDVLWCTELERIFGFPVHYTDVSNMGRGARQKLLGRSWSVPVIRHLFAPLKDYFACE

SEQ ID NO: 2193 - protein, 640 aa, Homo sapiens
MFSCVKPYEDQNYSALRRDCRRRKVLFEDPLFPATDDSLYYKGTPGPAVRWKRPKGICEDPRLFVDGISSHDLHQGQVGNCWFVAACSSLASRESLWQKVIPDWKEQEWDPEKPNAYAGIFHFHFWRFGEWVDVVIDDRLPTVNNQLIYCHSNSRNEFWCALVEKAYAKLAGCYQALDGGNTADALVDFTGGVSEPIDLTEGDFANDETKRNQLFERMLKVHSRGGLISASIKAVTAADMEARLACGLVKGHAYAVTDVRKVRLGHGLLAFFKSEKLDMIRLRNPWGEREWNGPWSDTSEEWQKVSKSEREKMGVTVQDDGEFWMTFEDVCRYFTDIIKCRVINTSHLSIHKTWEEARLHGAWTLHEDPRQNRGGGCINHKDTFFQNPQYIFEVKKPEDEVLICIQQRPKRSTRREGKGENLAIGFDIYKVEENRQYRMHSLQHKAASSIYINSRSVFLRTDQPEGRYVIIPTTFEPGHTGEFLLRVFTDVPSNCRELRLDEPPHTCWSSLCGYPQLVTQVHVLGAAGLKDSPTGANSYVIIKCEGDKVRSAVQKGTSTPEYNVKGIFYRKKLSQPITVQVWNHRVLKDEFLGQVHLKADPDNLQALHTLHLRDRNSRQPSNLPGTVAVHILSSTSLMAV

SEQ ID NO: 2194 - protein, 272 aa, Homo sapiens
MKMMHMAHCVTLVQLSISCDHLIDKDIGSKSDPLCVLLQDVGGGSWAELGRTERVRNCSSPEFSKTLQLEYRFETVQKLRFGIYDIDNKTPELRDDDFLGGAECSLGQIVSSQVLTLPLMLKPGKPAGRGTITVSAQELKDNRVVTMEVEARNLDKKDFLGKSDPFLEFFRQGDGKWHLVYRSEVIKNNLNPTWKRFSVPVQHFCGGNPSTPIQVQCSDYDSDGSHDLIGTFHTSLAQLQAVPLSLNASTLRSSRKRKATRTLELSVSRFVG

SEQ ID NO: 2195 - protein, 238 aa, Homo sapiens
  VARIANT 210, 217, 223: Xaa = Any Amino Acid
MFGVTLWEMFSGGEEPWAGVPPYLILQRLEDRARLPRPPLCSRALYSLALRCWAPHPSDRPSFSHLEGLLQEAGPSEACCVRDVTEPGALRMETGDPITVIEGSSSFHSPDSTIWKGQNGRTFKVGSFPASAVTLADAGGLPATRPVHRGHPCPGRSTPRKHRWRQKEGKSLGCAPSTGPEEEHAPGEDERHFQESGVSSVPRSSSHRGXVQAPLKXRQARAXAPGTSRPASTPTFIL

SEQ ID NO: 2196 - protein, 1239 aa, Homo sapiens
MPKVKMPKFSMPGFKGEGPDVDVNLPKADIDVSGPKVDVDVPDVNIEGPDAKLKGPKFKMPEMSIKAPKISMPDIDLNLKGPKVKGDVDVTLPKVEGDLKGPEADIKGPKVDINTPDVDVHGPDWHLKMPKVKMPKFSMPGFKGEGPDVDVSLPKADIDVSGPKVDVDIPDVNIEGPDAKLKGPKFKMPEINIKAPKISIPDVDLDLKGPKVKGDFDVSVPKVEGTLKGPEVDLKGPRLDFEGPDAKLSGPSLKMPSLEISAPKVTAPDVDLHLKAPKIGFSGPKLEGGEVDLKGPKVEAPSLDVHMDSPDINIEGPDVKIPKFKKPKFGFGAKSPKADIKSPSLDVTVPEAELNLETPEISVGGKGKKSKFKMPKIHMSGPKIKAKKQGFDLNVPGGEIDASLKAPDVDVNIAGPDAALKVDVKSPKTKKTMFGKMYFPDVEFDIKSPKFKAEAPLPSPKLEGELQAPDLELSLPAIHVEGLDIKAKAPKVKMPDVDISVPKIEGDLKGPKVQANLGAPDINIEGLDAKVKTPSFGISAPQVSIPDVNVNLKGPKIKGDVPSVGLEGPDVDLQGPEAKIKFPKFSMPKIGIPGVKMEGGGAEVHAQLPSLEGDLRGPDVKLEGPDVSLKGPGVDLPSVNLSMPKVSGPDLDLNLKGPSLKGDLDASVPSMKVHAPGLNLSGVGGKMQVGGDGVKVPGIDATTKLNVGAPDVTLRGPSLQGDLAVSGDIKCPKVSVGAPDLSLEASEGSIKLPKMKLPQFGISTPGSDLHVNAKGPQVSGELKGPGVDVNLKGPRISAPNVDFNLEGPKVKGSLGATGEIKGPTVGGGLPGIGVQGLEGNLQMPGIKSSGCDVNLPGVNVKLPTGQISGPEIKGGLKGSEVGFHGAAPDISVKGPAFNMASPESDFGINLKGPKIKGGADVSGGVSAPDISLGEGHLSVKGSGGEWKGPQVSSALNLDTSKFAGGLHFSGPKVEGGVKGGQIGLQAPGLSVSGPQGHLESGSGKVTFPKMKIPKFTFSGRELVGREMGVDVHFPKAEASIQAGAGDGEWEESEVKLKKSKIKMPKFNFSKPKGKGGVTGSPEASISGSKGDLKSSKASLGSLEGEAEAEASSPKGKFSLFKSKKPRHRSNSFSDEREFSGPSTPTGTLEFEGGEVSLEGGKVKGKHGKLKFGTFGGLGSKSKGHYEVTGSDDETGKLQGSGVSLASKKSRLSSSSSNDSGNKVGIQLPEVELSVSTKKE

SEQ ID NO: 2197 - protein, 707 aa, Homo sapiens
MDPGWGQRDVGWAALLILFAASLLTVFAWLLQYARGLWLARARGDRGPGPALAGEPAGSLRELGVWRSLLRLRATRAGAAEEPGVRGLLASLFAFNSFRENWQRAWVRALNEQACRNGSSIQIAFEEVPQLPPRASISHVTCVDQSEHTMVLRCQLSAEEVRFPVSVTQQSPAAVSMETYHVTLTLPPTQLEVNLEEIPGEGLLISWAFTDRPDLSLTVLPKLQARERGEEQVELSTIEELIKDAIVSTQPAMMVNLRACSAPGGLVPSEKPPMMPQAQPAIPRPNRLFLRQLRASHLGNELEGTEELCCVAELDNPMQQKWTKPARAGSEVEWTEDLALDLGPQSRELTLKVLRSSSCGDTELLGQATLPVGSPSRPLSRRQLCPLTPGPGKALGPAATMAVELHYEEGSPRNLGTPTSSTPRPSITPTKKIELDRTIMPDGTIVTTVTTVQSRPRIDGKLDSPSRSPSKVEVTEKTTTVLSESSGPSNTSHSSSPGDSHLSNGLDPVAETAIRQLTEPSGRVAKKTPTKRSTLIISGVSKVPIAQDELALSLGYAASLEASVQDDAGTSGGPSSPPSDPPAMSPGPLDALSSPTSVQEADETTRSDISERPSVDDIESETGSTGALETRSLKDHKVSFLRSGTKLIFRRMPRHNESGLSQSHDDLSNATATPSVRKKAGSFSRRLIKRFSFKSKPKANGNPSPPL

SEQ ID NO: 2198 - protein, 148 aa, Homo sapiens
MAKDILGEAGLHFDELNKLRVLDPEVTQQTIELKEECKDFVDKIGQFQKIVGGLIELVDQLAKEAENEKMKSLAVSPRLECTGAISAHCKLCLSDSSDSPTSPSRVGGTTGHRCSELAQIYSKAERSSTAATSSPNSRKENAARKVSG

SEQ ID NO: 2199 - protein, 103 aa, Homo sapiens
MAQFVRNLVEKTPALVNAAVTYSKPRLATFWYYAKVELVPPTPAEIPRAIQSLKKIVNSAQTGSFKQLTVKEAVLNGLVATEVLMWFYVGEIIGKRGIIGYDV

SEQ ID NO: 2200 - protein, 1744 aa, Homo sapiens
MVIDPLHVTLTPKKLKTGIGSTVILSCALTGSPEFTIRWYRNTELVLPDEAISIRGLSNETLLITSAQKSHSGAYQCFATRKAQTAQDFAIIALEDGTPRIVSSFSEKVVNPGEQFSLMCAAKGAPPPTVTWALDDEPIVRDGSHRTNQYTMSDGTTISHMNVTGPQIRDGGVYRCTARNLVGSAEYQARINVRGPPSIRAMRNITAVAGRDTLINCRVIGYPYYSIKWYKDALLLPDNHRQVVFENGTLKLTDVQKGMDEGEYLCSVLIQPQLSISQSVHVAVKVPPLIQPFEFPPASIGQLLYIPCVVSSGDMPIRITWRKDGQVIISGSGVTIESKEFMSSLQISSVSLKHNGNYTCIASNAAATVSRERQLIVRVPPRFVVQPNNQDGIYGKAGVLNCSVDGYPPPKVMWKHAKGSGNPQQYHPVPLTGRIQILPNSSLLIRHVLEEDIGYYLCQASNGVGTDISKSMFLTVKIPAMITSHPNTTIAIKGHAKELNCTARGERPIIIRWEKGDTVIDPDRVMRYAIATKDNGDEVVSTLKLKPADRGDSVFFSCHAINSYGEDRGLIQLTVQEPPDPPELEIREVKARSMNLRWTQRFDGNSIITGFDIEYKNKSDSWDFKQSTRNISPTINQANIVDLHPASVYSIRMYSFNKIGRSEPSKELTISTEEAAPDGPPMDVTLQPVTSQSIQVTWKAPKKELQNGVIRGYQIGYRENSPGSNGQYSIVEMKATGDSEVYTLDNLKKFAQYGVVVQAFNRAGTGPSSSEINATTLEDVPSQPPENVRALSITSDVAVISWSEPPRSTLNGVLKGYRVIFWSLYVDGEWGEMQNITTTRERVELRGMEKFTNYSVQVLAYTQAGDGVRSSVLYIQTKEDVPGPPAGIKAVPSSASSVVVSWLPPTKPNGVIRKYTIFCSSPGSGQPAPSEYETSPEQLFYRIAHLNRGQQYLLWVAAVTSAGRGNSSEKVTIEPAGKAPAKIISFGGTVTTPWMKDVRLPCNSVGDPAPAVKWTKDSEDSAIPVSMDGHRLIHTNGTLLLRAVKAEDSGYYTCTATNTGGFDTIIVNLLVQVPPDQPRLTVSKTSASSITLTWIPGDNGGSSIRGFVLQYSVDNSEEWKDVFISSSERSFKLDSLKCGTWYKVKLAAKNSVGSGRISEIIEAKTHGREPSFSKDQHLFTHINSTHARLNLQGWNNGGCPITAIVLEYRPKGTWAWQGLRANSSGEVFLTELREATWYELRMRACNSAGCGNETAQFATLDYDGSTIPPIKSAQGEGDDVKKLFTIGCPVILATLGVALLFIVRKKRKEKRLKRLRDAKSLAEMLISKNNRSFDTPVKGPPQGPRLHIDIPRVQLLIEDKEGIKQLGDDKATIPVTDAEFSQAVNPQSFCTGVSLHHPTLIQSTGPLIDMSDIRPGTNPVSRKNVKSAHSTRNRYSSQWTLTKCQASTPARTLTSDWRTVGSQHGVTVTESDSYSASLSQDTDKGRNSMVSTESASSTYEELARAYEHAKLEEQLQHAKFEITECFISDSSSDQMTTGTNENADSMTSMSTPSEPGICRFTASPPKPQDADRGKNVAVPIPHRANKSDYCNLPLYAKSEAFFRKADGREPCPVVPPREASIRNLARTYHTQARHLTLDPASKSLGLPHPGAPAAASTATLPQRTLAMPAPPAGTAPPAPGPTPAEPPTAPSAAPPAPSTEPPRAGGPHTKMGGSRDSLLEMSTSGVGRSQKQGAGAYSKSYTLV

SEQ ID NO: 2201 - protein, 158 aa, Homo sapiens
MSKDLEEVKAKVQPYLDDFQKKWQEEMELYRQKVEPLRAELQEGARQKLHELQEKLSPLGEEMRDRARAHVDALRTHLAPYSDELRQRLAARLEALKENGGARLAEYHAKATEHLSTLSEKAKPALEDLRQGLLPVLESFKVSFLSALEEYTKKLNTQ

SEQ ID NO: 2202 - protein, 397 aa, Homo sapiens
MGQAGCKGLCLSLFDYKTEKYVIAKNKKVGLLYRLLQASILAYLVVWVFLIKKGYQDVDTSLQSAVITKVKGVAFTNTSDLGQRIWDVADYVIPAQNEGIPDGACSKDSDCHAGEAVTAGNGVKTGRCLRRENLARGTCEIFAWCPLETSSRPEEPFLKEAEDFTIFIKNHIRFPKFNFSNNVMDVKDRSFLKSCHFGPKNHYCPIFRLGSVIRWAGSDFQDIALEGGVIGINIEWNCDLDKAASECHPHYSFSRLDNKLSKSVSSGYNFRFARYYRDAAGVEFRTLMKAYGIRFDVMVNGKGAFFCDLVLIYLIKKREFYRDKKYEEVRGLEDSSQEAEDEASGLGLSEQLTSGPGLLGMPEQQELQEPPEAKRGSSSQKGNGSVCPQLLEPHRST

SEQ ID NO: 2203 - protein, 548 aa, Homo sapiens
MLKRKAEEGVRVSILLFKEVELALGINSGYSKRALMLLHPNIKVMRHPDQVTLWAHHEKLLVVDQVVAFLGGLDLAYGRWDDLHYRLTDLGDSSESAASQPPTPRPDSPATPDLSHNQFFWLGKDYSNLITKDWVQLDRPFEDFIDRETTPRMPWRDVGVVVHGLPARDLARHFIQRWNFTKTTKAKYKTPTYPYLLPKSTSTANQLPFTLPGGQCTTVQVLRSVDRWSAGTLENSILNAYLHTIRESQHFLYIENQFFISCSDGRTVLNKVGDEIVDRILKAHKQGWCYRVYVLLPLLPGFEGDISTGGGNSIQAILHFTYRTLCRGEYSILHRLKAAMGTAWRDYISICGLRTHGELGGHPVSELIYIHSKVLIADDRTVIIGSANINDRSLLGKRDSELAVLIEDTETEPSLMNGAEYQAGRFALSLRKHCFGVILGANTRPDLDLRDPICDDFFQLWQDMAESNANIYEQIFRCLPSNATRSLRTLREYVAVEPLATVSPPLARSELTQVQGHLVHFPLKFLEDESLLPPLGSKEGMIPLEVWT

SEQ ID NO: 2204 - protein, 314 aa, Homo sapiens
MAATASAGAGGIDGKPRTSPKSVKFLFGGLAGMGATVFVQPLDLVKNRMQLSGEGAKTREYKTSFHALTSILKAEGLRGIYTGLSAGLLRQATYTTTRLGIYTVLFERLTGADGTPPGFLLKAVIGMTAGATGAFVGTPAEVALIRMTADGRLPADQRRGYKNVFNALIRITREEGVLTLWRGCIPTMARAVVVNAAQLASYSQSKQFLLDSGYFSDNILCHFCASMISGLVTTAASMPVDIAKTRIQNMRMIDGKPEYKNGLDVLFKVVRYEGFFSLWKGFTPYYARLGPHTVLTFIFLEQMNKAYKRLFLSG

SEQ ID NO: 2205 - protein, 153 aa, Homo sapiens
MAAVEHRHSSGLPYWPYLTAETLKNRMGHQPPPPTQQHSIIDNSLSLKTPSECVLYPLPPSADDNLKTPPECLLTPLPPSALPSADDNLKTPAECLLYPLPPSADDNLKTPPECLLTPLPPSAPPSADDNLKTPPECVCSLPFHPQRMIISRN

SEQ ID NO: 2206 - protein, 876 aa, Homo sapiens
MELITILEKTVSPDRLELEAAQKFLERAAVENLPTFLVELSRVLANPGNSQVARVAAGLQIKNSLTSKDPDIKAQYQQRWLAIDANARREVKNYVLQTLGTETYRPSSASQCVAGIACAEIPVNQWPELIPQLVANVTNPNSTEHMKESTLEAIGYICQDIDPEQLQDKSNEILTAIIQGMRKEEPSNNVKLAATNALLNSLEFTKANFDKESERHFIMQVVCEATQCPDTRVRVAALQNLVKIMSLYYQYMETYMGPALFAITIEAMKSDIDEVALQGIEFWSNVCDEEMDLAIEASEAAEQGRPPEHTSKFYAKGALQYLVPILTQTLTKQDENDDDDDWNPCKAAGVCLMLLATCCEDDIVPHVLPFIKEHIKNPDWRYRDAAVMAFGCILEGPEPSQLKPLVIQAMPTLIELMKDPSVVVRDTAAWTVGRICELLPEAAINDVYLAPLLQCLIEGLSAEPRVASNVCWAFSSLAEAAYEAADVADDQEEPATYCLSSSFELIVQKLLETTDRPDGHQNNLRSSAYESLMEIVKNSAKDCYPAVQKTTLVIMERLQQVLQMESHIQSTSDRIQFNDLQSLLCATLQNVLRKVQHQDALQISDVVMASLLRMFQSTAGSGGVQEDALMAVSTLVEVLGGEFLKYMEAFKPFLGIGLKNYAEYQVCLAAVGLVGDLCRALQSNIIPFCDEVMQLLLENLGNENVHRSVKPQILSVFGDIALAIGGEFKKYLEVVLNTLQQASQAQVDKSDYDMVDYLNELRESCLEAYTGIVQGLKGDQENVHPDVMLVQPRVEFILSFIDHIAGDEDHTDGVVACAAGLIGDLCTAFGKDVLKLVEARPMIHELLTEGRRSKTNKAKTLATWATKELRKLKNQA

SEQ ID NO: 2207 - protein, 105 aa, Homo sapiens
MAMSICHRGTGIALSAGVSLFGMLAVLLPGNFESYLELVKSLCLGPALIHTAKFALVFPLMYHTWNGIRHLMWDLGKGLKIPQLYQSGVVVLVLTVLSSMGLAAM

SEQ ID NO: 2208 - protein, 111 aa, Homo sapiens [sequence omitted]

SEQ ID NO: 2209 - protein, 732 aa, Homo sapiens
MPLTSILPLQVEESALPSAVLANGGKMPFTMPEAFLDDGDMVLGDELDDLLDSAPETNETVMPSALVRGPLQTASVSPSMPFSASLLGTLPIGARYAPPPSFSEFYPPLTSSLEDFCSSLNSFSMSESKRDLSTSTSREGTPLNNSNSSLLLMNGPGSLFASENFLGISSQPRNDFGNFFGSAVTKPSSSVTPRHPLEGTHELRQACQICFVKSGPKLMDFTYHANIDHKCKKDILIGRIKNVEDKSWKKIRPRPTKTNYEGPYYICKDVAAEEECRYSGHCTFAYCQEEIDVWTLERKGAFSREAFFGGNGKINLTVFKLLQEHLGEFIFLCEKCFDHKPRMISKRNKDNSTACSHPVTKHEFEDNKCLVHILRETTVKYSKIRSFHGQCQLDLCRHEVRYGCLREDECFYAHSLVELKVWIMQNETGISHDAIAQESKRYWQNLEANVPGAQVLGNQIMPGFLNMKIKFVCAQCLRNGQVIEPDKNRKYCSAKARHSWTKDRRAMRVMSIERKKWMNIRPLPTKKQMPLQFDLCNHIASGKKCQYVGNCSFAHSPEEREVWTYMKENGIQDMEQFYELWLKSQKNEKSEDIASQSNKENGKQIHMPTDYAEVTVDFHCWMCGKNCNSEKQWQGHISSEKHKEKVFHTEDDQYCWQHRFPTGYFSICDRYMNGTCPEGNSCKFAHGNAELHEWEERRDALKMKLNKARKDHLIGPNDNDFGKYSFLFKDLN

SEQ ID NO: 2210 - protein, 142 aa, Homo sapiens
MGAPTLPPAWQPFLKDHRISTFKNWPFLEGCACTPERMAEAGFIHCPTENEPDLAQCFFCFKELEGWEPDDDPIEEHKKHSSGCAFLSVKKQFEELTLGEFLKLDRERAKNKIAKETNNKKKEFEETAEKVRRAIEQLAAMD

SEQ ID NO: 2211 - protein, 394 aa, Homo sapiens
MWLPRVSSTAVTALLLAQTFLLLFLVSRPGPSSPAGGEARVHVLVLSSWRSGSSFVGQLFNQHPDVFYLMEPAWHVWTTLSQGSAATLHMAVRDLVRSVFLCDMDVFDAYLPWRRNLSDLFQWAVSRALCSPPACSAFPRGAISKQDVCKTLCARQPFSLAREACRSYSHVVLKEVRFFNLQVLYPLLSDPALNLRIVHLVRDPRAVLRSREAAGPILARDNGIVLGTNGKWVEADPHLRLIREVCRSHVRIAEAATLKPPPFLRGRYRLVRFEDLAREPLAEIRALYAFTGLTLTPQLEAWIHNITHGRGSASQSKPSILRLGMRATSPRPGATRCPSLRSCACRRCAPARCSCWATGLCTLRTSSVTSPWIWCCHEAQTTSAGHRLTENSGP

SEQ ID NO: 2212 - protein, 1479 aa, Homo sapiens
MGPGRPAPAPWPRHLLRCVLLLGCLHLGRPGAPGDAALPEPNIFLIFSHGLQGCLEAQGGQVRVTPACNTSLPAQRWKWVSRNRLFNLGTMQCLGTGWPGTNTTASLGMYECDREALNLRWHCRTLGDQLSLLLGARTSNISKPGTLERGDQTRSGQWRIYGSEEDLCALPYHEVYTIQGNSHGKPCTIPFKYDNQWFHGCTSTGREDGHLWCATTQDYGKDERWGFCPIKSNDCETFWDKDQLTDSCYQFNFQSTLSWREAWASCEQQGADLLSITEIHEQTYINGLLTGYSSTLWIGLNDLDTSGGWQWSDNSPLKYLNWESDQPDNPSEENCGVIRTESSGGWQNRDCSIALPYVCKKKPNATAEPTPPDRWANVKVECEPSWQPFQGHCYRLQAEKRSWQESKKACLRGGGDLVSIHSMAELEFITKQIKQEVEELWIGLNDLKLQMNFEWSDGSLVSFTHWHPFEPNNFRDSLEDCVTIWGPEGRWNDSPCNQSLPSICKKAGQLSQGAAEEDHGCRKGWTWHSPSCYWLGEDQVTYSEARRLCTDHGSQLVTITNRFEQAFVSSLIYNWEGEYFWTALQDLNSTGSFFWLSGDEVMYTHWNRDQPGYSRGGCVALATGSAMGLWEVKNCTSFRARYICRQSLGTPVTPELPGPDPTPSLTGSCPQGWASDTKLRYCYKVFSSERLQDKKSWVQAQGACQELGAQLLSLASYEEEHFVANMLNKIFGESEPEIHEQHWFWIGLNRRDPRGGQSWRWSDGVGFSYHNFDRSRHDDDDIRGCAVLDLASLQWVAMQCDTQLDWICKIPRGTDVREPDDSPQGRREWLRFQEAEYKFFEHHSTWAQAQRICTWFQAELTSVHSQAELDFLSHNLQKFSRAQEQHWWIGLHTSESDGRFRWTDGSIINFISWAPGKPRPVGKDKKCVYMTASREDWGDQRCLTALPYICKRSNVTKETQPPDLPTTALGGCPSDWIQFLNKCFQVQGQEPQSRVKWSEAQFSCEQQEAQLVTITNPLEQAFITASLPNVTFDLWIGLHASQRDFQWVEQEPLMYANWAPGEPSGPSPAPSGNKPTSCAVVLHSPSAHFTGRWDDRSCTEETHGFICQKGTDPSLSPSPAALPPAPGTELSYLNGTFRLLQKPLRWHDALLLCESHNASLAYVPDPYTQAFLTQAARGLRTPLWIGLAGEEGSRRYSWVSEEPLNYVGWQDGEPQQPGGCTYVDVDGAWRTTSCDTKLQGAVCGVSSGPPPPRRISYHGSCPQGLADSAWIPFREHCYSFHMELLLGHKEARQRCQRAGGAVLSILDEMENVFVWEHLQSYEGQSRGAWLGMNFNPKGGTLVWQDNTAVNYSNWGPPGLGPSMLSHNSCYWIQSNSGLWRPGACTNITMGVVCKLPRGEQSSFSPSALPENPAALVVVLMAVLLLLALLTAALILYRRRQSIERGAFEGARYSRSSSSPTEATEKNILVSDMEMNEQQE

SEQ ID NO: 2213 - protein, 454 aa, Homo sapiens
MDELLRRAVPPTPAYELREKTPAPAEGQCADFVSFYGGLAETAQRAELLGRLARGFGVDHGQVAEQSAGVLHLRQQQREAAVLLQAEDRLRYALVPRYRGLFHHISKLDGGVRFLVQLRADLLEAQALKLVEGPDVREMNGVLKGMLSEWFSSGFLNLERVTWHSPCEVLQKISEAEAVHPVKNWMDMKRRVGPYRRCYFFSHCSTPGEPLVVLHVALTGDISSNIQAIVKEHPPSETEEKNKITAAIFYSISLTQQGLQGVELGTFLIKRVVKELQREFPHLGVFSSLSPIPGFTKWLLGLLNSQTKEHGRNELFTDSECKEISEITGGPINETLKLLLSSSEWVQSEKLVRALQTPLMRLCAWYLYGEKHRGYALNPVANFHLQNGAVLWRINWMADVSLRGITGSCGLMANYRYFLEETGPNSTSYLGSKIIKASEQVLSLVAQFQKNSKL

SEQ ID NO: 2214 - protein, 453 aa, Homo sapiens
MKLLTRAGSFSRFYSLKVAPKVKATAAPAGAPPQPQDLEFTKLPNGLVIASLENYSPVSRIGLFIKAGSRYEDFSNLGTTHLLRLTSSLTTKGASSFKITRGIEAVGGKLSVTATRENMAYTVECLRGDVDILMEFLLNVTTAPEFRRWEVADLQPQLKIDKAVAFQNPQTHVIENLHAAAYRNALANPLYCPDYRIGKVTSEELHYFVQNHFTSARMALIGLGVSHPVLKQVAEQFLNMRGGLGLSGAKANYRGGEIREQNGDSLVHAAFVAESAVAGSAEANAFSVLQHVLGAGPHVKRGSNTTSHLHQAVAKATQQPFDVSAFNASYSDSGLFGIYTISQATAAGDVIKAAYNQVKTIAQGNLSNTDVQAAKNKLKAGYLMSVESSECFLEEVGSQALVAGSYMPPSTVLQQIDSVANADIINAAKKFVSGQKSMAASGNLGHTPFVDEL

SEQ ID NO: 2215 - protein, 453 aa, Homo sapiens; identical to SEQ ID NO: 2214

SEQ ID NO: 2216 - protein, 171 aa, Homo sapiens
MAAAAPNAGGSAPETAGSAEAPLQYSLLLQYLVGDKRQPRLLEPGSLGGIPSPAKSEEQKMIEKAMESCAFKAALACVGGFVLGGAFGVFTAGIDTNVGFDPKDPYRTPTAKEVLKDMGQRGMSYAKNFAIVGAMFSCTECLIESYRGTSDWKNSVISGCITGGAIGFRLA

SEQ ID NO: 2217 - protein, 1966 aa, Homo sapiens
MSSSGYPPNQGAFSTEQSRYPPHSVQYTFPNTRHQQEFAVPDYRSSHLEVSQASQLLQQQQQQQLRRRPSLLSEFHPGSDRPQERRTSYEPFHPGPSPVDHDSLESKRPRLEQVSDSHFQRVSAAVLPLVHPLPEGLRASADAKKDPAFGGKHEAPSSPISGQPCGDDQNASPSKLSKEELIQSMDRVDREIAKVEQQILKLKKKQQQLEEEAAKPPEPEKPVSPPPVEQKHRSIVQIIYDENRKKAEEAHKIFEGLGPKVELPLYNQPSDTKVYHENIKTNQVMRKKLILFFKRRNHARKQREQKICQRYDQLMEAWEKKVDRIENNPRRKAKESKTREYYEKQFPEIRKQREQQERFQRVGQRGAGLSATIARSEHEISEIIDGLSEQENNEKQMRQLSVIPPMMFDAEQRRVKFINMNGLMEDPMKVYKDRQFMNVWTDHEKEIFKDKFIQHPKNFGLIASYLERKSVPDCVLYYYLTKKNENYKALVRRNYGKRRGRNQQIARPSQEEKVEEKEEDKAEKTEKKEEEKKDEEEKDEKEDSKENTKEKDKIDGTAEETEEREQATPRGRKTANSQGRRKGRITRSMTNEAAAASAAAAAATEEPPPPLPPPPEPISTEPVETSRWTEEEMEVAKKGLVEHGRNWAAIAKMVGTKSEAQCKNFYFNYKRRHNLDNLLQQHKQKTSRKPREERDVSQCESVASTVSAQEDEDIEASNEEENPEDSEVEAVKPSEDSPENATSRGNTEPAVELEPTTETAPSTSPSLAVPSTKPAEDESVETQVNDSISAETAEQMDVDQQEHSAEEGSVCDPPPATKADSVDVEVRVPENHASKVEGDNTKERDLDRASEKVEPRDEDLVVAQQINAQRPEPQSDNDSSATCSADEDVDGEPERQRMFPMDSKPSLLNPTGSILVSSPLKPNPLDLPQLQHRAAVIPPMVSCTPCNIPIGTPVSGYALYQRHIKAMHESALLEEQRQRQEQIDLECRSSTSPCGTSKSPNREWEVLQPAPHQVITNLPEGVRLPTTRPTRPPPPLIPSSKTTVASEKPSFIMGGSISQGTPGTYLTSHNQASYTQETPKPSVGSISLGLPRQQESAKSATLPYIKQEEFSPRSQNSQPEGLLVRAQHEGVVRGTAGAIQEGSITRGTPTSKISVESIPSLRGSITQGTPALPQTGIPTEALVKGSISRMPIEDSSPEKGREEAASKGHVIYEGKSGHILSYDNIKNAREGTRSPRTAHEISLKRSYESVEGNIKQGMSMRESPVSAPLEGLICRALPRGSPHSDLKERTVLSGSIMQGTPRATTESFEDGLKYPKQIKRESPPIRAFEGAITKGKPYDGITTIKEMGRSIHEIPRQDILTQESRKTPEVVQSTRPIIEGSISQGTPIKFDNNSGQSAIKHNVKSLITGPSKLSRGMPPLEIVPENIKVVERGKYEDVKAGETVRSRHTSVVSSGPSVLRSTLHEAPKAQLSPGIYDDTSARRTPVSYQNTMSRGSPMMNRTSDVTISSNKSTNHERKSTLTPTQRESIPAKSPVPGVDPVVSHSPFDPHHRGSTAGEVYRSHLPTHLDPAMPFHRALDPAAAAYLFQRQLSPTPGYPSQYQLYAMENTRQTILNDYITSQQMQVNLRPDVARGLSPREQPLGLPYPATRGIIDLTNMPPTILVPHPGGTSTPPMDRITYIPGTQITFPPRPYNSASMSPGHPTHLAAAASAEREREREREKERERERIAAASSDLYLRPGSEQPGRPGSHGYVRSPSPSVRTQETMLQQRPSVFQGTNGTSVITPLDPTAQLRIMPLPAGGPSISQGLPASRYNTAADALAALVDAAASAPQMDVSKTKESKHEAARLEENLRSRSAAVSEQQQLEQKTLEVEKRSVQCLYTSSAFPSGKPQPHSSVVYSEAGKDKGPPPKSRYEEELRTRGKTTITAANFIDVIITRQIASDKDARERGSQSSDSSSSCIFSQV

SEQ ID NO: 2218 - protein, 246 aa, Homo sapiens
MNSAAVLGTSPSSPTFTFTLGRHYSRDCSSIKAGRRSSYLLAITTERSKSCDDGLNTFRDEGQVLRHLPNRIPSLPLLRSFFTDGSLDSWGTSEDADAPSKRHSTSDLSDATFSNIRREDWLYYKQILTKKGKKAGSGLRQWKRVYAALLARSLSLSKEQREPGPAAAGAVGAGAGEDKAAPVCIGSCLVDIYSETKRRHVFRLTTADFCEYLFQAEDRDDMLGGSERSGRTAGPRARTPAVPTKL

SEQ ID NO: 2219 - protein, 247 aa, Homo sapiens
MAKTKKGKRLSTKGKRRRRRLSLGSSQKTSLKKKMTRKAKRKAGTSQTSSQMRVRTTETAAWGAGSRWERPATCRGRTASRRRRKDGRPMPPTDTGSLLTSSTLRGRRTRSPETGERTEGLPTRGETKKRKSLKSTRRRRIKSPQKSTRTGRTEPQWTPRKIRKINRSSPRRLKRSTLPKTRLKANTKRSRTKNIPRRGSPREVPTRKKACLKSWKKRLSMSTEKTPTIKSARSPLTASRTEGRSRG

SEQ ID NO: 2220 - protein, 1704 aa, Homo sapiens
MAVLRQLALLLWKNYTLQKRKVLVTVLELFLPLLFSGILIWLRLKIQSENVPNATIYPGQSIQELPLFFTFPPPGDTWELAYIPSHSDAAKTVTETVRRALVINMRVRGFPSEKDFEDYIRYDNCSSSVLAAVVFEHPFNHSKEPLPLAVKYHLRFSYTRRNYMWTQTGSFFLKETEGWHTTSLFPLFPNPGPREPTSPDGGEPGYIREGFLAVQHAVDRAIMEYHADAATRQLFQRLTVTIKRFPYPPFIADPFLVAIQYQLPLLLLLSFTYTALTIARAVVQEKERRLKEYMRMMGLSSWLHWSAWFLLFFLFLLIAASFMTLLFCVKVKPNVAVLSRSDPSLVLAFLLCFAISTISFSFMVSTFFSKANMAAAFGGFLYFFTYIPYFFVAPRYNWMTLSQKLCSCLLSNVAMAMGAQLIGKFEAKGMGIQWRDLLSPVNVDDDFCFGQVLGMLLLDSVLYGLVTWYMEAVFPGQFGVPQPWYFFIMPSYWCGKPRAVAGKEEEDSDPEKALRNEYFEAEPEDLVAGIKIKHLSKVFRVGNKDRAAVRDLNLNLYEGQITVLLGHNGAGKTTTLSMLTGLFPPTSGRAYISGYEISQDMVQIRKSLGLCPQHDILFDNLTVAEHLYFYAQLKGLSRQKCPEEVKQMLHIIGLEDKWNSRSRFLSGGMRRKLSIGIALIAGSKVLILDEPTSGMDAISRRAIWDLLQRQKSDRTIVLTTHFMDEADLLGDRIAIMAKGELQCCGSSLFLKQKYGAGYHMTLVKEPHCNPEDISQLVHHHVPNATLESSAGAELSFILPRESTHRFEGLFAKLEKKQKELGIASFGASITTMEEVFLRVGKLVDSSMDIQAIQLPALQYQHERRASDWAVDSNLCGAMDPSDGIGALIEEERTAVKLNTGLALHCQQFWAMFLKKAAYSWREWKMVAAQVLVPLTCVTLALLAINYSSELFDDPMLRLTLGEYGRTVVPFSVPGTSQLGQQLSEHLKDALQAEGQEPREVLGDLEEFLIFRASVEGGGFNERCLVAASFRDVGERTVVNALFNNQAYHSPATALAVVDNLLFKLLCGPHASIVVSNFPQPRSALQAAKDQFNEGRKGFDIALNLLFAMAFLASTFSILAVSERAVQAKHVQFVSGVHVASFWLSALLWDLISFLIPSLLLLVVFKAFDVRAFTRDGHMADTLLLLLLYGWAIIPLMYLMNFFFLGAATAYTRLTIFNILSGIATFLMVTIMRIPAVKLEELSKTLDHVFLVLPNHCLGMAVSSFYENYETRRYCTSSEVAAHYCKKYNIQYQENFYAWSAPGVGRFVASMAASGCAYLILLFLIETNLLQRLRGILCALRRRRTLTELYTRMPVLPEDQDVADERTRILAPSPDSLLHTPLIIKELSKVYEQRVPLLAVDRLSLAVQKGECFGLLGFNGAGKTTTFKMLTGEESLTSGDAFVGGHRISSDVGKVRQRIGYCPQFDALLDHMTGREMLVMYARLRGIPERHIGACVENTLRGLLLEPHANKLVRTYSGGNKRKLSTGIALIGEPAVIFLDEPSTGMDPVARRLLWDTVARARESGKAIIITSHSMEECEALCTRLAIMVQGQFKCLGSPQHLKSKFGSGYSLRAKVQSEGQQEALEEFKAFVDLTFPGSVLEDEHQGMVHYHLPGRDLSWAKVFGILEKAKEKYGVDDYSVSQISLEQVFLSFAHLQPPTAEEGR

SEQ ID NO: 2221 - protein, 423 aa, Homo sapiens
MAAWGCVAALGAARGLCWRAARAAAGLQGRPARRCYAVGPAQSPPTFGFLLDIDGVLVRGHRVIPAALKAFRRLVNSQGQLRVPVVFVTNAGNILQHSKAQELSALLGCEVDADQVILSHSPMKLFSEYHEKRMLVSGQGPVMENAQGLGFRNVVTVDELRMAFPLLDMVDLERRLKTTPLPRNDFPRIEGVLLLGEPVRWETSLQLIMDVLLSNGSPGAGLATPPYPHLPVLASNMDLLWMAEAKMPRFGHGTFLLCLETIYQKVTGKELRYEGLMGKPSILTYQYAEDLIRRQAERRGWAAPIRKLYAVGDNPMSDVYGANLFHQYLQKATHDGAPELGAGGTRQQQPSASQSCISILVCTGVYNPRNPQSTEPVLGGGEPPFHGHRDLCFSPGLMEASHVVNDVNEAVQLVFRKEGWALE

SEQ ID NO: 2222 - protein, 139 aa, Homo sapiens
MAAALSCAGPRLPHHPPSNNRSWLWPRNKPAPNLEAGTVACSVGQGWAGSADASAAGCACVPPASVIWGRWGLMSSFMAGAVKETASRVQRPTGQPRLEHVVGSGFQKAWRGQASACVTFGTSLLAKVPHEAKPRCQVE

SEQ ID NO: 2223 - protein, 311 aa, Homo sapiens
MPAPRAPRALAAAAPASGKAKLTHPGKAILAGGLAGGIEICITFPTEYVKTQLQLDERSHPPRYRGIGDCVRQTVRSHGVLGLYRGLSSLLYGSIPKAAVRFGMFEFLSNHMRDAQGRLDSTRGLLCGLGAGVAEAVVVVCPMETIKVKFIHDQTSPNPKYRGFFHGVREIVREQGLKGTYQGLTATVLKQGSNQAIRFFVMTSLRNWYRGDNPNKPMNPLITGVFGAIAGAASVFGNTPLDVIKTRMQGLEAHKYRNTWDCGLQILKKEGLKAFYKGTVPRLGRVCLDVAIVFVIYDEVVKLLNKVWKTD

SEQ ID NO: 2224 - protein, 511 aa, Homo sapiens
MASCPWGQEQGARSPSEEPPEEEIPKEDGILVLSRHTLGLALREHPALLVEFYAPWCGHCQALAPEYSKAAAVLAAESMVVTLAKVDGPAQRELAEEFGVTEYPTLKFFRNGNRTHPEEYTGPRDAEGIAEWLRRRVGPSAMRLEDEAAAQALIGGRDLVVIGFFQDLQDEDVATFLALAQDALDMTFGLTDRPRLFQQFGLTKDTVVLFKKFDEGRADFPVDEELGLDLGDLSRFLVTHSMRLVTEFNSQTSAKIFAARILNHLLLFVNQTLAAHRELLAGFGEAAPRFRGQVLFVVVDVAADNEHVLQYFGLKAEAAPTLRLVNLETTKKYAPVDGGPVTAASITAFCHAVLNGQVKPYLLSQEIPPDWDQRPVKTLVGKNFEQVAFDETKNVFVKFYAPWCTHCKEMAPAWEALAEKYQDHEDIIIAELDATANELDAFAVHGFPTLKYFPAGPGRKVIEYKSTRDLETFSKFLDNGGVLPTEEPPEEPAAPFPEPPANSTMGSKEEL

SEQ ID NO: 2225 - protein, 116 aa, Homo sapiens
MEGVLKKTTGLVGLAVCNTPHERLRILYTKILDVLEEIPKNAAYRKYTEQITNEKLAMVKAEPDVKKLEDQLQGSQLEEVILQAEHELNLARKMREWKPWAPLVEEPPADQWKWPI

SEQ ID NO: 2226 - protein, 2130 aa, Homo sapiens
MDQGPWRCVAHAPRAPPTEVAMDALESLLDEVALEGLDGLCLPALWSRLETRVPPFPLPLEPCTQEFLWRALATHPGISFYEEPRERPDLQLQDRYEEIDLETGILESRRDPVALEDVYPIHMILENKDGIQGSCRYFKERKNITNDIRTKSLQPRCTMVEAFDRWGKKLIIVASQAMRYRALIGQEGDPDLKLPDFSYCILERLGRSRWQGELQRDLHTTAFKVDAGKLHYHRKILNKNGLITMQSHVIRLPTGAQQHSILLLLNRFHVDRRSKYDILMEKLSVMLSTRTNHIETLGKLREELGLCERTFKRLYQYMLNAGLAKVVSLRLQEIHPECGPCKTKKGTDVMVRCLKLLKEFKRNDHDDDEDEEVISKTVPPVDIVFERDMLTQTYDLIERRGTKGISQAEIRVAMNVGKLEARMLCRLLQRFKVVKGFMEDEGRQRTTKYISCVFAEESDLSRQYQREKARSELLTTVSLASMQEESLLPEGEDTFLSESDSEEERSSSKRRGRGSQKDTRASANLRPKTQPHHSTPTKGGWKVVNLHPLKKQPPSFPGAAEERACQSLASRDSLLDTSSVSEPNVSFVSHCADSNSGDIAVIEEVRMENPKESSSSLKTGRHSSGQDKPHETYRLLKRRNLIIEAVTNLRLIESLFTIQKMIMDQEKQEGVSTKCCKKSIVRLVRNLSEEGLLRLYRTTVIQDGIKKKVDLVVHPSMDQNDPLVRSAIEQVRFRISNSSTANRVKTSQPPVPQGEAEEDSQGKEGPSGSGDSQLSASSRSESGRMKKSDNKMGITPLRNYHPIVVPGLGRSLGFLPKMPRLRVVHMFLWYLIYGHPASNTVEKPSFISERRTIKQESGRAGVRPSSSGSAWEACSEAPSKGSQDGVTWEAEVELATETVYVDDASWMRYIPPIPVHRDFGFGWALVSDILLCLPLSIFIQIVQVSYKVDNLEEFLNDPLKKHTLIRFLPRPIRQQLLYKRRYIFSVVENLQRLCYMGLLQFGPTEKFQDKDQVFIFLKKNAVIVDTTICDPHYNLARSSRPFERRLYVLNSMQDVENYWFDLQCVCLNTPLGVVRCPRVRKNSSTDQGSDEEGSLQKEQESAMDKHNLERKCAMLEYTTGSREVVDEGLIPGDGLGAAGLDSSFYGHLKRNWIWTSYIINQAKKENTAAENGLTVRLQTFLSKRPMPLSARGNSRLNIWGEARVGSELCAGWEEQFEVDREPSLDRNRRVRGGKSQKRKRLKKDPGKKIKRKKKGEFPGEKSKRLRYHDEADQSALQRMTRLRVTWSMQEDGLLVLCRIASNVLNTKVKGPFVTWQVVRDILHATFEESLDKTSHSVGRRARYIVKNPQAYLNYKVCLAEVYQDKALVGDFMNRRGDYDDPKVCANEFKEFVEKLKEKFSSALRNSNLEIPDTLQELFARYRVLAIGDEKDQTRKEDELNSVDDIHFLVLQNLIQSTLALSDSQMKSYQSFQTFRLYREYKDHVLVKAFMECQKRSLVNRRRVNHTLGPKKNRALPFVPMSYQLSQTYYRIFTWRFPSTICTESFQFLDRMRAAGKLDQPDRFSFKDQDNNEPTNDMVAFSLDGPGGNCVAVLTLFSLGLISVDVRIPEQIIVVDSSMVENEVIKSLGKDGSLEDDEDEEDDLDEGVGGKRRSMEVKPAQASHTNYLLMRGYYSPGIVSTRNLNPNDSIVVNSCQMKFQLRCTPVPARLRPAAAPLEELTMGTSCLPDTFTKLINPQENTCSLEEFVLQLELSGYSPEDLTAALEILEAIIATGCFGIDKEELRRRFSALEKAGGGRTRTFADCIQALLEQHQVLEVGGNTARLVAMGSAWPWLLHSVRLKDREDADIQREDPQARPLEGSSSEDSPPEGQAPPSHSPRGTKRRASWASENGETDAEGTQMTPAKRPALQDSNLAPSLGPGAEDGAEAQAPSPPPALEDTAAAGAAQEDQEGVGEFSSPGQEQLSGQAQPPEGSEDPRGFTESFGAANISQAARERDCESVCFIGRPWRVVDGHLNLPVCKGMMEAMLYHIMTRPGIPESSLLRHYQGVLQPVAVLELLQGLESLGCIRKRWLRKPRPVSLFSTPVVEEVEVPSSLDESPMAFYEPTLDCTLRLGRVFPHEVNWNKWIHL

SEQ ID NO: 2227 - protein, 2044 aa, Homo sapiens
MCPVDFHGIFQLDERRRDAVIALGIFLIESDLQHKDCVVPYLLRLLKGLPKVYWVEESTARKGRGALPVAESFSFCLVTLLSDVAYRDPSLRDEILEVLLQVLHVLLGMCQALEIQDKEYLCKYAIPCLIGISRAFGRYSNMEESLLSKLFPKIPPHSLRVLEELEGVRRRSFNDFRSILPSNLLTVCQEGTLKRKTSSVSSISQVSPERGMPPPSSPGGSAFHYFEASCLPDGTALEPEYYFSTISSSFSVSPLFNGVTYKEFNIPLEMLRELLNLVKKIVEEAVLKSLDAIVASVMEANPSADLYYTSFSDPLYLTMFKMLRDTLYYMKDLPTSFVKEIHDFVLEQFNTSQGELQKILHDADRIHNELSPLKLRCQANAACVDLMVWAVKDEQGAENLCIKLSEKLQSKTSSKVIIAHLPLLICCLQGLGRLCERFPVVVHSVTPSLRDFLVIPSPVLVKLYKYHSQYHTVAGNDIKISVTNEHSESTLNVMSGKKSQPSMYEQLRDIAIDNICRCLKAGLTVDPVIVEAFLASLSNRLYISQESDKDAHLIPDHTIRALGHIAVALRDTPKVMEPILQILQQKFCQPPSPLDVLIIDQLGCLVITGNQYIYQEVWNLFQQISVKASSVVYSATKDYKDHGYRHCSLAVINALANIAANIQDEHLVDELLMNLLELFVQLGLEGKRASERASEKGPALKASSSAGNLGVLIPVIAVLTRRLPPIKEAKPRLQKLFRDFWLYSVLMGFAVEGSGLWPEEWYEGVCEIATKSPLLTFPSKEPLRSVLQYNSAMKNDTVTPAELSELRSTIINLLDPPPEVSALINKLDFAMSTYLLSVYRLEYMRVLRSTDPDRFQVMFCYFEDKAIQKDKSGMMQCVIAVADKVFDAFLNMMADKAKTKENEEELERHAQFLLVNFNHIHKRIRRVADKYLSGLVDKFPHLLWSGTVLKTMLDILQTLSLSLSADIHKDQPYYDIPDAPYRITVPDTYEARESIVKDFAARCGMILQEAMKWAPTVTKSHLQEYLNKHQNWVSGLSQHTGLAMATESILHFAGYNKQNTTLGATQLSERPACVKKDYSNFMASLNLRNRYAGEVYGMIRFSGTTGQMSDLNKMMVQDLHSALDRSHPQHYTQAMFKLTAMLISSKDCDPQLLHHLCWGPLRMFNEHGMETALACWEWLLAGKDGVEVPFMREMAGAWHMTVEQKFGLFSAEIKEADPLAASEASQPKPCPPEVTPHYIWIDFLVQRFEIAKYCSSDQVEIFSSLLQRSMSLNIGGAKGSMNRHVAAIGPRFKLLTLGLSLLHADVVPNATIRNVLREKIYSTAFDYFSCPPKFPTQGEKRLREDISIMIKFWTAMFSDKKYLTASQLVPPDNQDTRSNLDITVGSRQQATQGWINTYPLSSGMSTISKKSGMSKKTNRGSQLHKYYMKRRTLLLSLLATEIERLITWYNPLSAPELELDQAGENSVANWRSKYISLSEKQWKDNVNLAWSISPYLAVQLPARFKNTEAIGNEVTRLVRLDPGAVSDVPEAIKFLVTWHTIDADAPELSHVLCWAPTDPPTGLSYFSSMYPPHPLTAQYGVKVLRSFPPDAILFYIPQIVQALRYDKMGYVREYILWAASKSQLLAHQFIWNMKTNIYLDEEGHQKDPDIGDLLDQLVEEITGSLSGPAKDFYQREFDFFNKITNVSAIIKPYPKGDERKKACLSALSEVKVQPGCYLPSNPEAIVLDIDYKSGTPMQSAAKAPYLAKFKVKRCGVSELEKEGLRCRSDSEDECSTQEADGQKISWQAAIFKVGDDCRQDMLALQIIDLFKNIFQLVGLDLFVFPYRVVATAPGCGVIECIPDCTSRDQLGRQTDFGMYDYFTRQYGDESTLAFQQARYNFIRSMAAYSLLLFLLQIKDRHNGNIMLDKKGHIIHIDFGFMFESSPGGNLGWEPDIKLTDEMVMIMGGKMEATPFKWFMEMCVRGYLAVRPYMDAVVSLVTLMLDTGLPCFRGQTIKLLKHRFSPNMTEREAANFIMKVIQSCFLSNRSRTYDMIQYYQNDIPY

SEQ ID NO: 2228 - protein, 2789 aa, Homo sapiens
MRLGGGQLVSEELMNLGESFIQTNDPSLKLFQCAVCNKFTTDNLDMLGLHMNVERSLSEDEWKAVMGDSYQCKLCRYNTQLKSNFQLHCKTDKHVQKYQLVAHIKEGGKANEWRLKCVAIGNPVHLKCNACDYYTNSLEKLRLHTVNSRHEASLKLYKHLQQHESGVEGESCYYHCVLCNYSTKAKLNLIQHVRSMKHQRSESLRKLQRLQKGLPEEDEDLGQIFTIRRCPSTDPEEAIEDVEGPSETAADPEELAKDQEGGASSSQAEKELTDSPATSKRISFPGSSESPLSSKRPKTAEEIKPEQMYQCPYCKYSNADVNRLRVHAMTQHSVQPMLRCPLCQDMLNNKIHLQLHLTHLHSVAPDCVEKLIMTVTTPEMVMPSSMFLPAAVPDRDGNSNLEEAGKQPETSEDLGKNILPSASTEQSGDLKPSPADPGSVREDSGFICWKKGCNQVFKTSAALQTHFNEVHAKRPQLPVSDRHVYKYRCNQCSLAFKTIEKLQLHSQYHVIRAATMCCLCQRSFRTFQALKKHLETSHLELSEADIQQLYGGLLANGDLLAMGDPTLAEDHTIIVEEDKEEESDLEDKQSPTGSDSGSVQEDSGSEPKRALPFRKGPNFTMEKFLDPSRPYKCTVCKESFTQKNILLVHYNSVSHLHKLKRALQESATGQPEPTSSPDNKPFKCNTCNVAYSQSSTLEIHMRSVLHQTKARAAKLEAASGSSNGTGNSSSISLSSSTPSPVSTSGSNTFTTSNPSSAGIAPSSNLLSQVPTESVGMPPLGNPIGANIASPSEPKEANRKKLADMIASRQQQQQQQQQQQQQQQQQQQAQTLAQAQAQVQAHLQQELQQQAALIQSQLFNPTLLPHFPMTTETLLQLQQQQHLLFPFYIPSAEFQLNPEVSLPVTSGALTLTGTGPGLLEDLKAQVQVPQQSHQQILPQQQQNQLSIAQSHSALLQPSQHPEKKNKLVIKEKEKESQRERDSAEGGEGNTGPKETLPDALKAKEKKELAPGGGSEPSMLPPRIASDARGNATKALLENFGFELVIQYNENKQKVQKKNGKTDQGENLEKLECDSCGKLFSNILILKSHQEHVHQNYFPFKQLERFAKQYRDHYDKLYPLRPQTPEPPPPPPPPPPPPLPAAPPQPASTPAIPASAPPITSPTIAPAQPSVPLTQLSMPMELPIFSPLMMQTMPLQTLPAQLPPQLGPVEPLPADLAQLYQHQLNPTLLQQQNKRPRTRITDDQLRVLRQYFDINNSPSEEQIKEMADKSGLPQKVIKHWFRNTLFKERQRNKDSPYNFSNPPITSLEELKIDSRPPSPEPPKQEYWGSKRSSRTRFTDYQLRVLQDFFDANAYPKDDEFEQLSNLLNLPTRVIVVWFQNARQKARKNYENQGEGKDGERRELTNDRYIRTSNLNYQCKKCSLVFQRIFDLIKHQKKLCYKDEDEEGQDDSQNEDSMDAMEILTPTSSSCSTPMPSQAYSAPAPSANNTASSAFLQLTAEAEELATFNSKTEAGDEKPKLAEAPSAQPNQTQEKQGQPKPELQQQEQPEQKTNTPQQKLPQLVSLPSLPQPPPQAPPPQCPLPQSSPSPSQLSHLPLKPLHTSTPQQLANLPPQLIPYQCDQCKLAFPSFEHWQEHQQLHFLSAQNQFIHPQFLDRSLDMPFMLFDPSNPLLASQLLSGAIPQIPASSATSPSTPTSTMNTLKRKLEEKASASPGENDSGTGGEEPQRDKRLRTTITPEQLEILYQKYLLDSNPTRKMLDHIAHEVGLKKRVVQVWFQNTRARERKGQFRAVGPAQAHRRCPFCRALFKAKTALEAHIRSRHWHEAKRAGYNLTLSAMLLDCDGGLQMKGDIFDGTSFSHLPPSSSDGQGVPLSPVSKTMELSPRTLLSPSSIKVEGIEDFESPSMSSVNLNFDQTKLDNDDCSSVNTAITDTTTGDEGNADNDSATGIATETKSSSAPNEGLTKAAMMAMSEYEDRLSSGLVSPAPSFYSKEYDNEGTVDYSETSSLADPCSPSPGASGSAGKSGDSGDRPGQKRFRTQMTNLQLKVLKSCFNDYRTPTMLECEVLGNDIGLPKRVVQVWFQNARAKEKKSKLSMAKHFGINQTSYEGPKTECTLCGIKYSARLSVRDHIFSQQHISKVKDTIGSQLDKEKEYFDPATVRQLMAQQELDRIKKANEVLGLAAQQQGMFDNTPLQALNLPTAYPALQGIPPVLLPGLNSPSLPGFTPSNTALTSPKPNLMGLPSTTVPSPGLPTSGLPNKPSSASLSSPTPAQATMAMGPQQPPQQQQQQQQPQVQQPPPPPAAQPPPTPQLPLQQQQQRKDKDSEKVKEKEKAHKGKGEPLPVPKKEKGEAPTATAATISAPLPTMEYAVDPAQLQALQAALTSDPTALLTSQFLPYFVPGFSPYYAPQIPGALQSGYLQPMYGMEGLFPYSPALSQALMGLSPGSLLQQYQQYQQSLQEAIQQQQQRQLQQQQQQKVQQQQPKASQTPVPPGAPSPDKDPAKESPKPEEQKNTPREVSPLLPKLPEEPEAESKSADSLYDPFIVPKVQYKLVCRKCQAGFSDEEAARSHLKSLCFFGQSVVNLQEMVLHVPTGGGGGGSGGGGGGGGGGGGGGSYHCLACESALCGEEALSQHLESALHKHRTITRAARNAKEHPSLLPHSACFPDPSTASTSQSAAHSNDSPPPPSAAAPSSASPHASRKSWPQVVSRASAAKPPSFPPLSSSSTVTSSSCSTSGVQPSMPTDDYSEESDTDLSQKSDGPASPVEGPKDPSCPKDSGLTSVGTDTFRL

SEQ ID NO: 2229 - protein, 693 aa, Homo sapiens
MLDMSVPAVAKLRRLLDSLPREALPDILTSIIRTSNKEKLQILDAVSLEERFKMTIPLLVRQIEGLKLLQKTRKPKQDDDKRVIAIRPIRRITHISGTLEDEDEDEDNDDIVMLEKKIRTSSMPEQAHKVCVKEIKRLKKMPQSMPEYALTRNYLELMVELPWNKSTTDRLDIRAARILLDNDHYAMEKLKKRVLEYLAVRQLKNNLKGPILCFVGPPGVGKTSVGRSVAKTLGREFHRIALGGVCDQSDIRGHRRTYVGSMPGRIINGLKTVGVNNPVFLLDEVDKLGKSLQGDPAAALLEVLDPEQNHNFTDHYLNVAFDLSQVLFIATANTTATIPAALLDRMEIIQVPGYTQEEKIEIAHRHLIPKQLEQHGLTPQQIQIPQVTTLDIITRYTREAGVRSLDRKLGAICRAVAVKVAEGQHKEAKLDRSDVTEREGCREHILEDEKPESISDTTDLALPPEMPILIDFHALKDILGPPMYEMEVSQRLSQPGVAIGLAWTPLGGEIMFVEASRMDGEGQLTLTGQLGDVMKESAHLAISWLRSNAKKYQLTNAFGSFDLLDNTDIHLHFPAGAVTKDGPSAGVTIVTCLASLFSGRLVRSDVAMTGEITLRGLVLPVGGIKDKVLAAHRAGLKQVIIPRRNEKDLEGIPGNVRQDLSFVTASCLDEVLNAAFDGGFTVKTRPGLLNSKL

SEQ ID NO: 2230 - protein, 952 aa, Homo sapiens
MSKSKSDNQISDRAALEAKVKDLLTLAKTKDVEILHLRNELRDMRAQLGINEDHSEGDEKSEKETIMAHQPTDVESTLLQLQEQNTAIREELNQLKNENRMLKDRLNALGFSLEQRLDNSEKLFGYQSLSPEITPDNQSDGGGTLTSSVEGSAPGSVEDLLSQDENTLMDHQHSNSMDNLDSECSEVYQPLTSSDDALDAPSSSESEGIPSIERSRKGSSGNASEVSVACLTERIHQMEENQHSTSEELQATLQELADLQQITQELNSENERLGEEKVILMESLCQQSDKLEHFSRQIEYFRSLLDEHHISYVIDEDVKSGRYMELEQRYMDLAENARFEREQLLGVQQHLSNTLKMAEQDNKEAQEMIGALKERSHHMERIIESEQKGKAALAATLEEYKATVASDQIEMNRLKAQLENEKQKVAELYSIHNSGDKSDIQDLLESVRLDKEKAETLASSLQEDLAHTRNDANRLQDAIAKVEDEYRAFQEEAKKQIEDLNMTLEKLRSDLDEKETERSDMKETIFELEDEVEQHRAVKLHDNLIISDLENTVKKLQDQKHDMEREIKTLHRRLREESAEWRQFQADLQTAVVIANDIKSEAQEEIGDLKRRLHEAQEKNEKLTKELEEIKSRKQEEERGRVYNYMNAVERDLAALRQGMGLSRRSSTSSEPTPTVKTLIKSFDSASQVPNPAAAAIPRTPLSPSPMKTPPAAAVSPMQRHSISGPISTSKPLTALSDKRPNYGEIPVQEHLLRTSSASRPASLPRVPAMESAKTLSVSRRSSEEVKRDISAQEGASPASLMAMGTTSPQLSLSSSPTASVTPTTRSRIREERKDPLSALAREYGGSKRNALLKWCQKKTEGYQNIDITNFSSSWNDGLAFCALLHTYLPAHIPYQELNSQDKRRNFMLAFQAAESVGIKSTLDINEMVRTERPDWQNVMLYVTAIYKYFET

SEQ ID NO: 2231 - protein, 2263 aa, Homo sapiens
MYNGIGLPTPRGSGTNGYVQRNLSLVRGRRGERPDYKGEEELRRLEAALVKRPNPDILDHERKRRVELRCLELEEMMEEQGYEEQQIQEKVATFRLMLLEKDVNPGGKEETPGQRPAVTETHQLAELNEKKNERLRAAFGISDSYVDGSSFDPQRRAREAKQPAPEPPKPYSLVRESSSSRSPTPKQKKKKKKKDRGRRSESSSPRRERKKSSKKKKHRSESESKKRKHRSPTPKSKRKSKDKKRKRSRSTTPAPKSRRAHRSTSADSASSSDTSRSRSRSAAAKTHTTALAGRSPSPASGRRGEGDAPFSEPGTTSTQRPSSPETATKQPSSPYEDKDKDKKEKSATRPSPSPERSSTGPEPPAPTPLLAERHGGSPQPLATTPLSQEPVNPPSEASPTRDRSPPKSPEKLPQSSSSESSPPSPQPTKVSRHASSSPESPKPAPAPGSHREISSSPTSKNRSHGRAKRDKSHSHTPSRRMGRSRSPATAKRGRSRSRTPTKRGHSRSRSPQWRRSRSAQRWGRSRSPQRRGRSRSPQRPGWSRSRNTQRRGRSRSARRGRSHSRSPATRGRSRSRTPARRGRSRSRTPARRRSRSRTPTRRRSRSRTPARRGRSRSRTPARRRSRTRSPVRRRSRSRSPARRSGRSRSRTPARRGRSRSRTPARRGRSRSRTPARRSGRSRSRTPARRGRSRSRTPRRGRSRSRSLVRRGRSHSRTPQRRGRSGSSSERKNKSRTSQRRSRSNSSPEMKKSRISSRRSRSLSSPRSKAKSRLSLRRSLSGSSPCPKQKSQTPPRRSRSGSSQTKAKSRTPPRRSRSSSSPPPKQKSKTPSRQSHSSSSPHPKVKSGTPPRQGSITSPQANEQSVTPQRRSCFESSPDPELKSRTPSRHSCSGSSPPRVKSSTPPRQSPSRSSSPQPKVKAIISPRQRSHSGSSSPSPSRVTSRTTPRRSRSVSPCSNVESRLLPRYSHSGSSSPDTKVKPETPPRQSHSGSISPYPKVKAQTPPGPSLSGSKSPCPQEKSKDSLVQSCPGSLSLCAGVKSSTPPGESYFGVSSLQLKGQSQTSPDHRSDTSSPEVRQSHSESPSLQSKSQTSPKGGRSRSSSPVTELASRSPIRQDRGEFSASPMLKSGMSPEQSRFQSDSSSYPTVDSNSLLGQSRLETAESKEKMALPPQEDATASPPRQKDKFSPFPVQDRPESSLVFKDTLRTPPRERSGAGSSPETKEQNSALPTSSQDEELMEVVEKSEEPAGQILSHLSSELKEMSTSNFESSPEVEERPAVSLTLDQSQSQASLEAVEVPSMASSWGGPHFSPEHKELSNSPLRENSFGSPLEFRNSGPLGTEMNTGFSSEVKEDLNGPFLNQLETDPSLDMKEQSTRSSGHSSSELSPDAVEKAGMSSNQSISSPVLDAVPRTPSRERSSSASSPEMKDGLPRTPSRRSRSGSSPGLRDGSGTPSRHSLSGSSPGMKDIPRTPSRGRSECDSSPEPKALPQTPRPRSRSPSSPELNNKCLTPQRERSGSESSVDQKTVARTPLGQRSRSGSSQELDVKPSASPQERSESDSSPDSKAKTRTPLRQRSRSGSSPEVDSKSRLSPRRSRSGSSPEVKDKPRAAPRAQSGSDSSPEPKAPAPRALPRRSRSGSSSKGRGPSPEGSSSTESSPEHPPKSRTARRGSRSSPEPKTKSRTPPRRRSSRSSPELTRKARLSRRSRSASSSPETRSRTPPRHRRSPSVSSPEPAEKSRSSRRRRSASSPRTKTTSRRGRSPSPKPRGLQRSRSRSRREKTRTTRRRDRSGSSQSTSRRRQRSRSRSRVTRRRRGGSGYHSRSPARQESSRTSSRRRRGRSRTPPTSRKRSRSRTSPAPWKRSRSRASPATHRRSRSRTPLISRRRSRSRTSPVSRRRSRSRTSVTRRRSRSRASPVSRRRSRSRTPPVTRRRSRSRTPTTRRRSRSRTPPVTRRRSRSRTPPVTRRRSRSRTSPITRRRSRSRTSPVTRRRSRSRTSPVTRRRSRSRTSPVTRRRSRSRTPPAQDQPRSPVPSAFSDQSRCLIAQTTPVAGSQSLSSGAVATTTSSAGDHNGMLSVPAPGVPHSDVGEPPASTGAQQPSALAALQPAKERRSSSSSSSSSSSSSSSSSSSSSSSSSGSSSSDSEGSSLPVQPEVALKRSPAPPQPQRRLFERDVLRSQPQPNGRGALAVPVPAPPLHLPPPPPPPLLPPPLPLLLLPPHLPPPRRLPPLPLLSLALRPCPNLQAPRSHPLASGGPAAPGSQ

SEQ ID NO: 2232 - protein, 387 aa, Homo sapiens
MSFRDLRNFTEMMRALGYPRHISMENFRTPNFGLVSEVLLWLVKRYEPQTDIPPDVDTEQDRVFFIKAIAQFMATKAHIKLNTKKLYQADGYAVKELLKITSVLYNAMKTKGMEGSEIVEEDVNKFKFDLGSKIADLKAARQLASEITSKGASLYDLLGMEVELREMRTEAIARPLEINETEKVMRIAIKEILTQVQKTKDLLNNVASDEANLEAKIEKRKLELERNRKRLETLQSVRPCFMDEYEKTEEELQKQYDTYLEKFQNLTYLEQQLEDHHRMEQERFEEAKNTLCLIQNKLKEEEKRLLKSGSNDDSDIDIQEDDESDSELEERRLPKPQTAMEMLMQGRPGKRIVGTMQGGDSDDNVSPPLPSVVLCTLGLAVPIDGSG

SEQ ID NO: 2233 - protein, 599 aa, Homo sapiens
MTDSKYFTTTKKGEIFELKAELNSDKKEKKKEAVKKVIASMTVGKDVSALFPDVVNCMQTDNLELKKLVYLYLMNYAKSQPDMAIMAVNTFVKDCEDPNPLIRALAVRTMGCIRVDKITEYLCEPLRKCLKDEDPYVRKTAAVCVAKLHDINAQLVEDQGFLDTLKDLISDSNPMVVANAVAALSEIAESHPSSNLLDLNPQSINKLLTALNECTEWGQIFILDCLANYMPKDDREAQSICERVTPRLSHANSAVVLSAVKVLMKFMEMLSKDLDYYGTLLKKLAPPLVTLLSAEPELQYVALRNINLIVQKRPEILKHEMKVFFVKYNDPIYVKLEKLDIMIRLASQANIAQVLAELKEYATEVDVDFVRKAVRAIGRCAIKVEQSAERCVSTLLDLIQTKVNYVVQEAIVVIKDIFRKYPNKYESVIATLCENLDSLDEPEARAAMIWIVGEYAERIDNADELLESFLEGFHDESTQVQLQLLTAIVKLFLKKPTETQELVQQVLSLATQDSDNPDLRDRGYIYWRLLSTDPVAAKEVVLAEKPLISEETDLIEPTLLDELICYIGTLASVYHKPPSAFVEGGRGVVHKSLPPRTAS

SEQ ID NO: 2234 - protein, 166 aa, Homo sapiens
MSEPQPRGAERDLYRDTWVRYLGYANEVGEAFRSLVPAAVVWLSYGVASSYVLADAIDKGKKAGEVPSPEAGRSARVTVAVVDTFVWQALASVAIPGFTINRVCAASLYVLGTATRWPLAVRKWTTTALGLLTIPIIIHPIDRSVDFLLDSSLRKLYPTVGKPSSS

SEQ ID NO: 2235 - protein, 985 aa, Homo sapiens
MDRRSMGETESGDAFLDLKKPPASKCPHRYTKEELLDIKELPHSKQRPSCLSEKYDSDGVWDPEKWHASLYPASGRSSPVESLKKELDTDRPSLVRRIVDPRERVKEDDLDVVLSPQRRSFGGGCHVTAAVSSRRSGSPLEKDSDGLRLLGGRRIGSGRIISARTFEKDHRLSDKDLRDLRDRDRERDFKDKRFRREFGDSKRVFGERRRNDSYTEEEPEWFSAGPTSQSETIELTGFDDKILEEDHKGRKRTRRRTASVKEGIVECNGGVAEEDEVEVILAQEPAADQEVPRDAVLPEQSPGDFDFNEFFNLDKVPCLASMIEDVLGEGSVSASRFSRWFSNPSRSGSRSSSLGSTPHEELERLAGLEQAILSPGQNSGNYFAPIPLEDHAENKVDILEMLQKAKVDLKPLLSSLSANKEKLKESSHSGVVLSVEEVEAGLKGLKVDQQVKNSTPFMAEHLEETLSAVTNNRQLKKDGDMTAFNKLVSTMKASGTLPSQPKVSRNLESHLMSPAEIPGQPVPKNILQELLGQPVQRPASSNLLSGLMGSLEPTTSLLGQRAPSPPLSQVFQTRAASADYLRPRIPSPIGFTPGPQQLLGDPFQGMRKPMSPITAQMSQLELQQAALEGLALPHDLAVQAANFYQPGFGKPQVDRTRDGFRNRQQRVTKSPAPVHRGNSSSPAPAASITSMLSPSFTPTSVIRKMYESKEKSKEEPASGKAALGDSKEDTQKASEENLLSSSSVPSADRDSSPTTNSKLSALQRSSCSTPLSQANRYTKEQDYRPKATGRKTPTLASPVPTTPFLRPVHQVPLVPHVPMVRPAHQLHPGLVQRMLAQGVHPQHLPSLLQTGVLPPGMDLSHLQGISGPILGQPFYPLPAASHPLLNPRPGTPLHLAMVQQQLQRSVLHPPGSGSHAAAVSVQTTPQNVPSRSGLPHMHSQLEHRPSQRSSSPVGLAKWFGSDVLQQPLPSMPAKVISVDELEYRQ

SEQ ID NO: 2236 - protein, 288 aa, Homo sapiens
MAALFQEASSCPVCSDYLEKPMSLECGCAVCLKCINSLQKEPHGEDLLCCCSSMVSRKNKIRRNRQLERLASHIKELEPKLKKILQMNPRMRKFQVDMTLDANTANNFLLISDDLRSVRSGRIRQNRQDLAERFDVSVCILGSPRFTCGRHCWEVDVGTSTEWDLGVCRESVHRKGRIQLTTELGFWTVSLRDGGRLSATTVPLTFLFVDRKLQRVGIFLDMGMQNVSFFDAESGSHVYTFRSVSAEEPLRPFLAPSVPPNGDQGVLSICPLMNSGTTDAPVRPGEAK

SEQ ID NO: 2237 - protein, 297 aa, Homo sapiens
MVHQVLYRALVSTKWLAESIRTGKLGPGLRVLDASWYSPGTREARKEYLERHVPGASFFDIEECRDTASPYEMMLPSEAGFAEYVGRLGISNHTHVVVYDGEHLGSFYAPRVWWMFRVFGHRTVSVLNGGFRNWLKEGHPVTSEPSRPEPAVFKATLDRSLLKTYEQVLENLESKRFQLVDSRSQGRFLGTEPEPDAVGLDSGHIRGAVNMPFMDFLTEDGFEKGPEELRALFQTKKVDLSQPLIATCRKGVTACHVALAAYLCGKPDVAVYDGSWSEWFRRAPPESRVSQGKSEKA

SEQ ID NO: 2238 - protein, 117 aa, Homo sapiens
MTPGASALPCRHPSTSWASLSASTSTSRLELMETWSSGPIHPSPAMMTRASWTWSSRFTSRTPIPSFPLEGRCLSTWRACRLETPLSSGAPVGCWSTRAKGSSPSDLTKSPTLSSGQ

SEQ ID NO: 2239 - protein, 1480 aa, Homo sapiens
  VARIANT 499, 500, 501, 502, 503, 504, 505, 506, 507, 508, 509: Xaa = Any Amino Acid
MELSELAREGELSMEELLQQYAGAYAPGSGSSEDEDEDEVDANSSDCEPEGPVEAEEPPQEDSSSQSDSVEDRSEDEEDEHSEEEETSGSSASEESESEESEDAQSQSQADEEEEDDDFGVEYLLARDEEQSEADAGSGPPTPGPTTLGPKKEITDIAAAAESLQPKGYTLATTQVKTPIPLLLRGQLREYQHIGLDWLVTMYEKKLNGILADEMGLGKTIQTISLLAHLACEKGNWGPHLIIVPTSVMLNWEMELKRWCPSFKILTYYGAQKERKLKRQGWTKPNAFHVCITSYKLVLQDHQAFRRKNWRYLILDEAQNIKNFKSQRWQSLLNFNSQRRLLLTGTPLQNSLMELWSLMHFLMPHVFQSHREFKEWFSNPLTGMIEGSQEYNEGLVKRLHKVLRPFLLRRVKVDVEKQMPKKYEHVIRCRLSKRQRCLYDDFMAQTTTKETLATGHFMSVINILMQLRKVCNHPNLFDPRPVTSPFITPGICFSTASLXXXXXXXXXXXRIDMGRFDLIGLEGRVSRYEADTFLPRHRLSRRVLLEVATAPDPPPRPKPVKMKVNRMLQPVPKQEGRTVVVVNNPRAPLGPVPVRPPPGPELSAQPTPGPVPQVLPASLMVSASPAGPPLIPASRPPGPVLLPPLQPNSGSLPQVLPSPLGVLSGTSRPPTPTLSLKPTPPAPVRLSPAPPPGSSSLLKPLTVPPGYTFPPAAATTTSTTTATATTTAVPAPTPAPQRLILSPDMQARLPSGEVVSIGQLASLAQRPVANAGGSKPLTFQIQGNKLTLTGAQVRQLAVGQPRPLQRNVVHLVSAGGQHHLISQPAHVALIQAVAPTPGPTPVSVLPSSTPSTTPAPTGLSLPLAANQVPPTMVNNTGVVKIVVRQAPRDGLTPVPPLAPAPRPPSSGLPAVLNPRPTLTPGRLPTPTLGTARAPMPTPTLVRPLLKLVHSPSPEVSASAPGAAPLTISSPLHVPSSLPGPASSPMPIPNSSPLASPVSSTVSVPLSSSLPISVPTTLPAPASAPLTIPISAPLTVSASGPALLTSVTPPLAPVVPAAPGPPSLAPSGASPSASALTLGLATAPSLSSSQTPGHPLLLAPTSSHVPGLNSTVAPACSPVLVPASALASPFPSAPNPAPAQASLLAPASSASQALATPLAPMAAPQTAILAPSPAPPLAPLPVLAPSPGAAPVLASSQTPVPVMAPSSTPGTSLASASPVPAPTPVLAPSSTQTMLPAPVPSPLPSPASTQTLALAPALAPTLGGSSPSQTLSLGTGNPQGPFPTQTLSLTPASSLVPTPAQTLSLAPGPPLGPTQTLSLAPAPPLAPASPVGPAPAHTLTLAPASSSASLLAPASVQTLTLSPAPVPTLGPAAAQTLALAPASTQSPASQASSLVVSASGAAPLPVTMVSRLPVSKDEPDTLTLRSGPPSPPSTATSFGGPRPRRQPPPPPRSPFYLVSFTSSRGNRKLSFFGVLVGWMEQ

SEQ ID NO: 2240 - protein, 515 aa, Homo sapiens
MATSTGRWLLLRLALFGFLWEASGGLDSGASRDDDLLLPYPRARARLPRDCTRVRAGNREHESWPPPPATPGAGGLAVRTFVSHFRDRAVAGHLTRAVEPLRTFSVLEPGGPGGCAARRRATVEETARAADCRVAQNGGFFRMNSGECLGNVVSDERRVSSSGGLQNAQFGIRRDGTLVTGYLSEEEVLDTENPFVQLLSGVVWLIRNGSIYINESQATECDETQETGSFSKFVNVISARTAIGHDRKGQLVLFHADGQTEQRGINLWEMAEFLLKQDVVNAINLDGGGSATFVLNGTLASYPSDHCQDNMWRCPRQVSTVVCVHEPRCQPPDCHGHGTCVDGHCQCTGHFWRGPGCDELDCGPSNCSQHGLCTETGCRCDAGWTGSNCSEECPLGWHGPGCQRPCKCEHHCPCDPKTGNCSVSRVKQCLQPPEATLRAGELSFFTRTAWLALTLALAFLLLISTAANLSLLLSRAERNRRLHGDYAYHPLQEMNGEPLAAEKEQPGGAHNPFKD

SEQ ID NO: 2241 - protein, 1321 aa, Homo sapiens
MDSAGNKLIAPAVCFVIPPTDPEALALADSLGSQYRSVRQKAAGSKRTLQQRYEVLKTENPGDASDLQGRQLLAGLDKVASDLDRQEKAITGILRPPLEQGRAVQDSAERAKDLKNITNELLRIEPEKTRSTAEGEAFIQALPGSGTTPLLRTRVEDTNRKYEHLLQLLDLAQEKVDVANRLEKSLQQSWELLATHENHLNQDDTVPESSRVLDSKGQELAAMACELQAQKSLLGEVEQNLQAAKQCSSTLASRFQEHCPDLERQEAEVHKLGQRFNNLRQQVERRAQSLQSAKAAYEHFHRGHDHVLQFLVSIPSYEPQETDSLSQMETKLKNQKNLLDEIASREQEVQKICANSQQYQQAVKDYELEAEKLRSLLDLENGRRSHVSKRARLQSPATKVKEEEAALAAKFTEVYAINRQRLQNLEFALNLLRQQPEVEVTHETLQRNRPDSGVEEAWKIRKELDEETERRRQLENEVKSTQEEIWTLRNQGPQESVVRKEVLKKVPDPVLEESFQQLQRTLAEEQHKNQLLQEELEALQLQLRALEQETRDGGQEYVVKEVLRIEPDRAQADEVLQLREELEALRRQKGAREAEVLLLQQRVAALAEEKSRAQEKVTEKEVVKLQNDPQLEAEYQQLQEDHQRQDQLREKQEEELSFLQDKLKRLEKERAMAEGKITVKEVLKVEKDAATEREVSDLTRQYEDEAAKARASQREKTELLRKIWALEEENAKVVVQEKVREIVRPDPKAESEVANLRLELVEQERKYRGAEEQLRSYQSELEALRRRGPQVEVKEVTKEVIKYKTDPEMEKELQRLREEIVDKTRLIERCDLEIYQLKKEIQALKDTKPQVQTKEVVQEILQFQEDPQTKEEVASLRAKLSEEQKKQVDLERERASQEEQIARKEEELSRVKERVVQQEVVRYEEEPGLRAEASAFAESIDVELRQIDKLRAELRRLQRRRTELERQLEELERERQARREAEREVQRLQQRLAALEQEEAEAREKVTHTQKVVLQQDPQQAREHALLRLQLEEEQHRRQLLEGELETLRRKLAALEKAEVKEKVVLSESVQVEKGDTEQEIQRLKSSLEEESRSKRELDVEVSRLEARLSELEFHNSKSSKELDFLREENHKLQLERQNLQLETRRLQSEINMAATETRDLRNMTVADSGTNHDSRLWSLERELDDLKRLSKDKDLEIDELQKRLGSVAVKREQRENHLRRSIVVIHPDTGRELSPEEAHRAGLIDWNMFVKLRSQECDWEEISVKGPNGESSVIHDRKSGKKFSIEEALQSGRLTPAQYDRYVNKDMSIQELAVLVSGQK

SEQ ID NO: 2242 - protein, 331 aa, Homo sapiens
MAVSFLQLHPREDACIPNTNYGVLLIEFFELYGRHFNYLKTGIRIKDGGSYVAKDEVQKNMLDGYRPSMLYIEDPLQPGNDVGRSSYGAMQVKQAFDYAYVVLSHAVSPIAKYYPNNETESILGRIIRVTDEVATYRDWISKQWGLKNRPEPSCNGNGVTLIVDTQQLDKCNNNLSEENEALGKCRSKTSESLSKHSSNSSSGPVSSSSATQSSSSDVDSDATPCKTPKQLLCRPSTGNRVGSQDVSLESSQAVGKMQSTQTTNTSNSTNKSQHGSARLFRSSSKGFQGTTQTSHGSLMTNKQHQGKSNNQYYHGKKRKHKRDAPLSDLCR

SEQ ID NO: 2243 - protein, 1019 aa, Homo sapiens
MGSKRGISSRHHSLSSYEIMFAALFAILVVLCAGLIAVSCLTIKESQRGAALGQSHEARATFKITSGVTYNPNLQDKLSVDFKVLAFDLQQMIDEIFLSSNLKNEYKNSRVLQFENGSIIVVFDLFFAQWVSDENVKEELIQGLEANKSSQLVTFHIDLNSVDILDKLTTTSHLATPGNVSIECLPGSSPCTDALTCIKADLFCDGEVNCPDGSDEDNKMCATVCDGRFLLTGSSGSFQATHYPKPSETSVVCQWIIRVNQGLSIKLSFDDFNTYYTDILDIYEGVGSSKILRASIWETNPGTIRIFSNQVTATFLIESDESDYVGFNATYTAFNSSELNNYEKINCNFEDGFCFWVQDLNDDNEWERIQGSTFSPFTGPNFDHTFGNASGFYISTPTGPGGRQERVGLLSLPLDPTLEPACLSFWYHMYGENVHKLSINISNDQNMEKTVFQKEGNYGDNWNYGQVTLNETVKFKVAFNAFKNKILSDIALDDISLTYGICNGSLYPEPTLVPTPPPELPTDCGGPFELWEPNTTFSSTNFPNSYPNLAFCVWILNAQKGKNIQLHFQEFDLENINDVVEIRDGEEADSLLLAVYTGPGPVKDVFSTTNRMTVLLITNDVLARGGFKANFTTGYHLGIPEPCKADHFQCKNGECVPLVNLCDGHLHCEDGSDEADCVRFFNGTTNNNGLVRFRIQSIWHTACAENWTTQISNDVCQLLGLGSGNSSKPIFPTDGGPFVKLNTAPDGHLILTPSQQCLQDSLIRLQCNHKSCGKKLAAQDITPKIVGGSNAKEGAWPWVVGLYYGGRLLCGASLVSSDWLVSAAHCVYGRNLEPSKWTAILGLHMKSNLTSPQTVPRLIDEIVINPHYNRRRKDNDIAMMHLEFKVNYTDYIQPICLPEENQVFPPGRNCSIAGWGTVVYQGTTANILQEADVPLLSNERCQQQMPEYNITENMICAGYEEGGIDSCQGDSGGPLMCQENNRWFLAGVTSFGYKCALPNRPGVYARVSRFTEWIQSFLH

SEQ ID NO: 2244 - protein, 100 aa, Homo sapiens
MATGDLGDPGASVLAHVEEECSLPIVTVITLLPETTDATAQGRGPSTAPAVSCPAHPMVNHFVMNSVRPKMAISLMQKESKLLWNGFPNMQVSCQRMCAS

SEQ ID NO: 2245 - protein, 1244 aa, Homo sapiens
MVNFDYHQMVKGGKAEKLHSVLKPQVQKFLDYGFFYFNGSEVQRCQSGTVRTNCLDCLDRTNSVQAFLGLEMLAKQLEALGLAEKPQLVTRFQEVFRSMWSVNGDSISKIYAGTGALEGKAKLKDGARSVTRTIQNNFFDSSKQEAIDVLLLGNTLNSDLADKARALLTTGSLRVSEQTLQSASSKVLKSMCENFYKYSKPKKIRVCVGTWNVNGGKQFRSIAFKNQTLTDWLLDAPKLAGIQEFQDKRSKPTDIFAIGFEEMVELNAGNIVSASTTNQKLWAVELQKTISRDNKYVLLASEQLVGVCLFVFIRPQHAPFIRDVAVDTVKTGMGGATGNKGAVAIRMLFHTTSLCFVCSHFAAGQSQVKERNEDFIEIARKLSFPMGRMLFSHDYVFWCGDFNYRIDLPNEEVKELIRQQNWDSLIAGDQLINQKNAGQVFRGFLEGKVTFAPTYKYDLFSDDYDTSEKCRTPAWTDRVLWRRRKWPFDRSAEDLDLLNASFQDESKILYTWTPGTLLHYGRAELKTSDHRPVVALIDIDIFEVEAEERQNIYKEVIAVQGPPDGTVLVSIKSSLPENNFFDDALIDELLQQFASFGEVILIRFVEDKMWVTFLEGSSALNVLSLNGKELLNRTITIALKSPDWIKNLEEEMSLEKISIALPSSTSSTLLGEDAEVAADFDMEGDVDDYSAEVEELLPQHLQPSSSSGLGTSPSSSPRTSPCQSPTISEGPVPSLPIRPSRAPSRTPGPPSAQSSPIDAQPATPLPQKDPAQPLEPKRPPPPRPVAPPTRPAPPQRPPPPSGARSPAPTRKEFGGIGAPPSPGVARREMEAPKSPGTTRKDNIGRSQPSPQAGLAGPGPAGYSTARPTIPPRAGVISAPQSHARASAGRLTPESQSKTSETSKGSTFLPEPLKPQAAFPPQSSLPPPAQRLQEPLVPVAAPMPQSGPQPNLETPPQPPPRSRSSHSLPSEASSQPQVKTNGISDGKRESPLKIDPFEDLSFNLLAVSKAQLSVQTSPVPTPDPKRLIQLPSATQSNVLSSVSCMPTMPPIPARSQSQENMRSSPNPFITGLTRTNPFSDRTAAPGNPFRAKSEESEATSWFSKEEPVTISPFPSLQPLGHNKSRASSSLDGFKDSFDLQGQSTLKISNPKGWVTFEEEEDFGVKGKSKSACSDLLGNQPSSFSGSNLTLNDDWNKGTNVSFCVLPSRRPPPPPVPLLPPGTSPPVDPFTTLASKASPTLDFTER

SEQ ID NO: 2246 - protein, 1459 aa, Homo sapiens
MNLSDIDQDGKLTAEEFILAMHLIDVAMSGQPLPPVLPPEYIPPSFRRVRSGSGISVISSTSVDQRLPEEPVLEDEQQQLEKKLPVTFEDKKRENFERGNLELEKRRQALLEQQRKEQERLAQLERAEQERKERERQEQERKRQLELEKQLEKQRELERQREEERRKEIERREAAKRELERQRQLEWERNRRQELLNQRNKEQEDIVVLKAKKKTLEFELEALNDKKHQLEGKLQDIRCRLTTQRQEIESTNKSRELRIAEITHLQQQLQESQQMLGRLIPEKQILNDQLKQVQQNSLHRDSLVTLKRALEAKELARQHLRDQLDEVEKETRSKLQEIDIFNNQLKELREIHNKQQLQKQKSMEAERLKQKEQERKIIELEKQKEEAQRRAQERDKQWLEHVQQEDEHQRPRKLHEEEKLKREESVKKKDGEEKGKQEAQDKLGRLFHQHQEPAKPAVQAPWSTAEKGPLTISAQENVKVVYYRALYPFESRSHDEITIQPGDIVMVKGEWVDESQTGEPGWLGGELKGKTGWFPANYAEKIPENEVPAPVKPVTDSTSAPAPKLALRETPAPLAVTSSEPSTTPNNWADFSSTWPTSTNEKPETDNWDAWAAQPSLTVPSAGQLRQRSAFTPATATGSSPSPVLGQGEKVEGLQAQALYPWRAKKDNHLNFNKNDVITVLEQQDMWWFGEVQGQKGWFPKSYVKLISGPIRKSTSMDSGSSESPASLKRVASPAAKPVVSGEEFIAMYTYESSEQGDLTFQQGDVILVTKKDGDWWTGTVGDKAGVFPSNYVRLKDSEGSGTAGKTGSLGKKPEIAQVIASYTATGPEQLTLAPGQLILIRKKNPGGWWEGELQARGKKRQIGWFPANYVKLLSPGTSKITPTEPPKSTALAAVCQVIGMYDYTAQNDDELAFNKGQIINVLNKEDPDWWKGEVNGQVGLFPSNYVKLTTDMDPSQQWCSDLHLLDMLTPTERKRQGYIHELIVTEENYVNDLQLVTEIFQKPLMESELLTEKEVAMIFVNWKELIMCNIKLLKALRVRKKMSGEKMPVKMIGDILSAQLPHMQPYIRFCSRQLNGAALIQQKTDEAPDFKEFVKRLAMDPRCKGMPLSSFILKPMQRVTRYPLIIKNILENTPENHPDHSHLKHALEKAEELCSQVNEGVREKENSDRLEWIQAHVQCEGLSEQLVFNSVTNCLGPRKFLHSGKLYKAKSNKELYGFLFNDFLLLTQITKPLGSSGTDKVFSPKSNLQYKMYKTPIFLNEVLVKLPTDPSGDEPIFHISHIDRVYTLRAESINERTAWVQKIKAASELYIETEKKKREKAYLVRSQRATGIGRLMVNVVEGIELKPCRSHGKSNPYCEVTMGSQCHITKTIQDTLNPKWNSNCQFFIRDLEQEVLCITVFERDQFSPDDFLGRTEIRVADIKKDQGSKGPVTKCLLLHEVPTGEIVVRLDLQLFDEP

SEQ ID NO: 2247 - protein, 268 aa, Homo sapiens
MAAVRVLVASRLAAASAFTSLSPGGRTPSQRAALHLSVPRPAARVALVLSGCGVYDGTEIHEASAILVHLSRGGAEVQIFAPDVPQMHVIDHTKGQPSEGESRNVLTESARIARGKITDLANLSAANHDAAIFPGGFGAAKNLSTFAVDGKDCKVNKEVERVLKEFHQAGKPIGLCCIAPVLAAKVLRGVEVTVGHEQEEGGKWPYAGTAEAIKALGAKHCVKEVVEAHVDQKNKVVTTPAFMCETALHYIHDGIGAMVRKVLELTGK

SEQ ID NO: 2248 - protein, 720 aa, Homo sapiens
MRSMCNQGRGRESSRGGLHVQGSCRGLSRSPQQETGFAKAPAGTDCFFHCSPGSRGQGDRKEEVTSEPGGTSIMSRLGGMNAAVRAVTRMGIYVGAKVFLIYEGYEGLVEGGENIKQANWLSVSNIIQLGGTIIGSARCKAFTTREGRRAAAYNLVQHGITNLCVIGGDGSLTGANIFRSEWGSLLEELVAEGKISETTARTYSHLNIAGLVGSIDNDFCGTDMTIGTDSALHRIMEVIDAITTTAQSHQRTFVLEVMGRHCGYLALVSALASGADWLFIPEAPPEDGWENFMCERLGETRSRGSRLNIIIIAEGAIDRNGKPISSSYVKDLVVQRLGFDTRVTVLGHVQRGGTPSAFDRILSSKMGMEAVMALLEATPDTPACVVTLSGNQSVRLPLMECVQMTKEVQKAMDDKRFDEATQLRGGSFENNWNIYKLLAHQKPPKEKSNFSLAILNVGAPAAGMNAAVRSAVRTGISHGHTVYVVHDGFEGLAKGQVQEVGWHDVAGWLGRGGSMLGTKRTLPKGQLESIVENIRIYGIHALLVVGGFEAYEGVLQLVEARGRYEELCIVMCVIPATISNNVPGTDFSLGSDTAVNAAMESCDRIKQSASGTKRRVFIVETMGGYCGYLATVTGIAVGADAAYVFEDPFNIHDLKVNVEHMTEKMKTDIQRGLVLRNEKCHDYYTTEFLYNLYSSEGKGVFDCRTNVLGHLQQGWRSNPL

SEQ ID NO: 2249 - protein, 1699 aa, Homo sapiens
MQEEEIKRLEEMNINIRKKVAQLQEEVEKQKNIVKGLEQDKEVLKKQQMSSLLLASTLQSTLDAGRCPEPPSGSPPEGPEIQLEVTQRALLRRESEVLDLKEQLEKMKGDLESKNEEILHLNLKLDMQNSQTAVSLRELEEENTSLKVIYTRSSEIEELKATIENLQENQKRLQKEKAEEIEQLHEVIEKLQHELSLMGPVVHEVSDSQAGSLQSELLCSQAGGPRGQALQGELEAALEAKEALSRLLADQERRHSQALEALQQRLQGAEEAAELQLAELERNVALREAEVEDMASRIQEFEAALKAKEATIAERNLEIDALNQRKAAHSAELEAVLLALARIRRALEQQPLAAGAAPPELQWLRAQCARLSRQLQVLHQRFLRCQVELDRRQARRATAHTRVPGAHPQPRMDGGAKAQVTGDVEASHDAALEPVVPDPQGDLQPVLVTLKDAPLCKQEGVMSVLTVCQRQLQSELLLVKNEMRLSLEDGGKGKEKVLEDCQLPKVDLVAQVKQLQEKLNRLLYSMTFQNVDAADTKSLWPMASAHLLESSWSDDSCDGEEPDISPHIDTCDANTATGGVTDVIKNQAIDACDANTTPGGVTDVIKNWDSLIPDEMPDSPIQEKSECQDMSLSSPTSVLGGSRHQSHTAEAGPRKSPVGMLDLSSWSSPEVLRKDWTLEPWPSLPVTPHSGALSLCSADTSLGDRADTSLPQTQGPGLLCSPGVSAAALALQWAESPPADDHHVQRTAVEKDVEDFITTSFDSQETLSSPPPGLEGKADRSEKSDGSGFGARLSPGSGGPEAQTAGPVTPASISGRFQPLPEAMKEKEVRPKHVKALLQMVRDESHQILALSEGLAPPSGEPHPPRKEDEIQDISLHGGKTQEVPTACPDWRGDLLQVVQEAFEKEQEMQGVELQPRLSGSDLGGHSSLLERLEKIIREQGDLQEKSLEHLRLPDRSSLLSEIQALRAQLRMTHLQNQEKLQHLRTALTSAEARGSQQEHQLRRQVELLAYKVEQEKCIAGDLQKTLSEEQEKANSVQKLLAAEQTVVRDLKSDLCESRQKSEQLSRSLCEVQQEVLQLRSMLSSKENELKAALQELESEQGKGRALQSQLEEEQLRHLQRESQSAKALEELRASLETQRAQSSRLCVALKHEQTAKDNLQKELRIEHSRCEALLAQERSQLSELQKDLAAEKSRTLELSEALRHERLLTEQLSQRTQEACVHQDTQAHHALLQKLKEEKSRVVDLQAMLEKVQQQALHSQQQLEAEAQKHCEALRREKERELELQRQRDLHKIKQLQQTVRDLESKDEVPGSRLHLGSARRAAGSDADHLREQQRELEAMRQRLLSAARLLTSFTSQAVDRTVNDWTSSNEKAVMSLLHTLEELKSDLSRPTSSQKKMAAELQFQFVDVLLKDNVSLTKALSTVTQEKLELSRAVSKLEKLLKHHLQKGCSPSRSERSAWKPDETAPQSSLRRPDPGRLPPAASEEAHTSNVKMEKLYLHYLRAESFRKALIYQKKYLLLLIGGFQDSEQETLSMIAHLGVFPSKAERKITSRPFTRFRTAVRVVIAILRLRFLVKKWQEVDRKGALAQGKAPRPGPRARQPQSPPRTRESPPTRDVPSGHTRDPARGRRLAAAASPHSGGRATPSPNSRLERSLTASQDPEHSLTEYIHHLEVIQQRLGGVLPDSTSKKSCHPMIKQ

SEQ ID NO: 2250 - protein, 3141 aa, Homo sapiens
MATLEKLMKAFESLKSFQQQQQQQQQQQQQQQQQQQQPPPPPPPPPPPQLPQPPPQAQPLLPQPQPPPPPPPPPPGPAVAEEPLHRPKKELSATKKDRVNHCLTICENIVAQSVRNSPEFQKLLGIAMELFLLCSDDAESDVRMVADECLNKVIKALMDSNLPRLQLELYKEIKKNGAPRSLRAALWRFAELAHLVRPQKCRPYLVNLLPCLTRTSKRPEESVQETLAAAVPKIMASFGNFANDNEIKVLLKAFIANLKSSSPTIRRTAAGSAVSICQHSRRTQYFYSWLLNVLLGLLVPVEDEHSTLLILGVLLTLRYLVPLLQQQVKDTSLKGSFGVTRKEMEVSPSAEQLVQVYELTLHHTQHQDHNVVTGALELLQQLFRTPPPELLQTLTAVGGIGQLTAAKEESGGRSRSGSIVELIAGGGSSCSPVLSRKQKGKVLLGEEEALEDDSESRSDVSSSALTASVKDEISGELAASSGVSTPGSAGHDIITEQPRSQHTLQADSVDLASCDLTSSATDGDEEDILSHSSSQVSAVPSDPAMDLNDGTQASSPISDSSQTTTEGPDSAVTPSDSSEIVLDGTDNQYLGLQIGQPQDEDEEATGILPDEASEAFRNSSMALQQAHLLKNMSHCRQPSDSSVDKFVLRDEATEPGDQENKPCRIKGDIGQSTDDDSAPLVHCVRLLSASFLLTGGKNVLVPDRDVRVSVKALALSCVGAAVALHPESFFSKLYKVPLDTTEYPEEQYVSDILNYIDHGDPQVRGATAILCGTLICSILSRSRFHVGDWMGTIRTLTGNTFSLADCIPLLRKTLKDESSVTCKLACTAVRNCVMSLCSSSYSELGLQLIIDVLTLRNSSYWLVRTELLETLAEIDFRLVSFLEAKAENLHRGAHHYTGLLKLQERVLNNVVIHLLGDEDPRVRHVAAASLIRLVPKLFYKCDQGQADPVVAVARDQSSVYLKLLMHETQPPSHFSVSTITRIYRGYNLLPSITDVTMENNLSRVIAAVSHELITSTTRALTFGCCEALCLLSTAFPVCIWSLGWHCGVPPLSASDESRKSCTVGMATMILTLLSSAWFPLDLSAHQDALILAGNLLAASAPKSLRSSWASEEEANPAATKQEEVWPALGDRALVPMVEQLFSHLLKVINICAHVLDDVAPGPAIKAALPSLTNPPSLSPIRRKGKEKEPGEQASVPLSPKKGSEASAASRQSDTSGPVTTSKSSSLGSFYHLPSYLKLHDVLKATHANYKVTLDLQNSTEKFGGFLRSALDVLSQILELATLQDIGKCVEEILGYLKSCFSREPMMATVCVQQLLKTLFGTNLASQFDGLSSNPSKSQGRAQRLGSSSVRPGLYHYCFMAPYTHFTQALADASLRNMVQAEQENDTSGWFDVLQKVSTQLKTNLTSVTKNRADKNAIHNHIRLFEPLVIKALKQYTTTTCVQLQKQVLDLLAQLVQLRVNYCLLDSDQVFIGFVLKQFEYIEVGQFRESEAIIPNIFFFLVLLSYERYHSKQIIGIPKIIQLCDGIMASGRKAVTHAIPALQPIVHDLFVLRGTNKADAGKELETQKEVVVSMLLRLIQYHQVLEMFILVLQQCHKENEDKWKRLSRQIADIILPMLAKQQMHIDSHEALGVLNTLFEILAPSSLRPVDMLLRSMFVTPNTMASVSTVQLWISGILAILRVLISQSTEDIVLSRIQELSFSPYLISCTVINRLRDGDSTSTLEEHSEGKQIKNLPEETFSRFLLQLVGILLEDIVTKQLKVEMSEQQHTFYCQELGTLLMCLIHIFKSGMFRRITAAATRLFRSDGCGGSFYTLDSLNLRARSMITTHPALVLLWCQILLLVNHTDYRWWAEVQQTPKRHSLSSTKLLSPQMSGEEEDSDLAAKLGMCNREIVRRGALILFCDYVCQNLHDSEHLTWLIVNHIQDLISLSHEPPVQDFISAVHRNSAASGLFIQAIQSRCENLSTPTMLKKTLQCLEGIHLSQSGAVLTLYVDRLLCTPFRVLARMVDILACRRVEMLLAANLQSSMAQLPMEELNRIQEYLQSSGLAQRHQRLYSLLDRFRLSTMQDSLSPSPPVSSHPLDGDGHVSLETVSPDKDWYVHLVKSQCWTRSDSALLEGAELVNRIPAEDMNAFMMNSEFNLSLLAPCLSLGMSEISGGQKSALFEAAREVTLARVSGTVQQLPAVHHVFQPELPAEPAAYWSKLNDLFGDAALYQSLPTLARALAQYLVVVSKLPSHLHLPPEKEKDIVKFVVATLEALSWHLIHEQIPLSLDLQAGLDCCCLALQLPGLWSVVSSTEFVTHACSLIYCVHFILEAVAVQPGEQLLSPERRTNTPKAISEEEEEVDPNTQNPKYITAACEMVAEMVESLQSVLALGHKRNSGVPAFLTPLLRNIIISLARLPLVNSYTRVPPLVWKLGWSPKPGGDFGTAFPEIPVEFLQEKEVFKEFIYRINTLGWTSRTQFEETWATLLGVLVTQPLVMEQEESPPEEDTERTQINVLAVQAITSLVLSAMTVPVAGNPAVSCLEQQPRNKPLKALDTRFGRKLSIIRGIVEQEIQAMVSKRENIATHHLYQAWDPVPSLSPATTGALISHEKLLLQINPERELGSMSYKLGQVSIHSVWLGNSITPLREEEWDEEEEEEADAPAPSSPPTSPVNSRKHRAGVDIHSCSQFLLELYSRWILPSSSARRTPAILISEVVRSLLVVSDLFTERNQFELMYVTLTELRRVHPSEDEILAQYLVPATCKAAAVLGMDKAVAEPVSRLLESTLRSSHLPSRVGALHGVLYVLECDLLDDTAKQLIPVISDYLLSNLKGIAHCVNIHSQQHVLVMCATAFYLIENYPLDVGPEFSASIIQMCGVMLSGSEESTPSIIYHCALRGLERLLLSEQLSRLDAESLVKLSVDRVNVHSPHRAMAALGLMLTCMYTGKEKVSPGRTSDPNPAAPDSESVIVAMERVSVLFDRIRKGFPCEARVVARILPQFLDDFFPPQDIMNKVIGEFLSNQQPYPQFMATVVYKVFQTLHSTGQSSMVRDWVMLSLSNFTQRAPVAMATWSLSCFFVSASTSPWVAAILPHVISRMGKLEQVDVNLFCLVATDFYRHQIEEELDRRAFQSVLEVVAAPGSPYHRLLTCLRNVHKVTTC

SEQ ID NO: 2251 - protein, 244 aa, Homo sapiens; identical to SEQ ID NO: 1678

SEQ ID NO: 2252 - protein, 697 aa, Homo sapiens
MQTQEILRILRLPELGDLGQFFRSLSATTLVSMGALAAILAYWFTHRPKALQPPCNLLMQSEEVEDSGGARRSVIGSGPQLLTHYYDDARTMYQVFRRGLSISGNGPCLGFRKPKQPYQWLSYQEVADRAEFLGSGLLQHNCKACTDQFIGVFAQNRPEWIIVELACYTYSMVVVPLYDTLGPGAIRYIINTADISTVIVDKPQKAVLLLEHVERKETPGLKLIILMDPFEEALKERGQKCGVVIKSMQAVEDCGQENHQAPVPPQPDDLSIVCFTSGTTGNPKGAMLTHGNVVADFSGFLKVTESQWAPTCADVHISYLPLAHMFERMVQSVVYCHGGRVGFFQGDIRLLSDDMKALCPTIFPVVPRLLNRMYDKIFSQANTPLKRWLLEFAAKRKQAEVRSGIIRNDSIWDELFFNKIQASLGGCVRMIVTGAAPASPTVLGFLRAALGCQVYEGYGQTECTAGCTFTTPGDWTSGHVGAPLPCNHIKLVDVEELNYWACKGEGEICVRGPNVFKGYLKDPDRTKEALDSDGWLHTGDIGKWLPAGTLKIIDRKKHIFKLAQGEYVAPEKIENIYIRSQPVAQIYVHGDSLKAFLVGIVVPDPEVMPSWAQKRGIEGTYADLCTNKDLKKAILEDMVRLGKESGLHSFEQVKAIHIHSDMFSVQNGLLTPTLKAKRPELREYFKKQIEELYSISM

SEQ ID NO: 2253 - protein, 1270 aa, Homo sapiens
MDLLTRENVALKVESAQQPKQVLKMEVAVLKKLQGKDHVCRFIGCGRNEKFNYVVMQLQGRNLADLRRSQPRGTFTLSTTLRLGKQILESIEAIHSVGFLHRDIKPSNFAMGRLPSTYRKCYMLDFGLARQYTNTTGDVRPPRNVAGFRGTVRYASVNAHKNREMGRHDDLWSLFYMLVEFAVGQLPWRKIKDKEQVGMIKEKYEHRMLLKHMPSEFHLFLDHIASLDYFTKPDYQLIMSVFENSMKERGIAENEAFDWEKAGTDALLSTSTSTPPQQNTRQTAAMFGVVNVTPVPGDLLRENTEDVLQGEHLSDQENAPPILPGRPSEGLGPSPHLVPHPGGPEAEVWEETDVNRNKLRINIGKSPCVEEEQSRGMGVPSSPVRAPPDSPTTPVRSLRYRRVNSPESERLSTADGRVELPERRSRMDLPGSPSRQACSSQPAQMLSVDTGHADRQASGRMDVSASVEQEALSNAFRSVPLAEEEDFDSKEWVIIDKETELKDFPPGAEPSTSGTTDEEPEELRPLPEEGEERRRLGAEPTVRPRGRSMQALAEEDLQHLPPQPLPPQLSQGDGRSETSQPPTPGSPSHSPLHSGPRPRRRESDPTGPQRQVFSVAPPFEVNGLPRAVPLSLPYQDFKRDLSDYRERARLLNRVRRVGFSHMLLTTPQVPLAPVQPQANGKEEEEEEEEDEEEEEEDEEEEEEEEEEEEEEEEEEEEEEEAAAAVALGEVLGPRSGSSSEGSERSTDRSQEGAPSTLLADDQKESRGRASMADGDLEPEEGSKTLVLVSPGDMKKSPVTAELAPDPDLGTLAALTPQHERPQPTGSQLDVSEPGTLSSVLKSEPKPPGPGAGLGAGTVTTGVGGVAVTSSPFTKVERTFVHIAEKTHLNVMSSGGQALRSEEFSAGGELGLELASDGGAVEEGARAPLENGLALSGLNGAEIEGSALSGAPRETPSEMATNSLPNGPALADGPAPVSPLEPSPEKVATISPRRHAMPGSRPRSRIPVLLSEEDTGSEPSGSLSAKERWSKRARPQQDLARLVMEKRQGRLLLRLASGASSSSSEEQRRASETLSGTGSEEDTPASEPAAALPRKSGRAAATRSRIPRPIGLRMPMPVAAQQPASRSHGAAPALDTAITSRLQLQTPPGSATAADLRPKQPPGRGLGPGRAQAGARPPAPRSPRLPASTSAARNASASPRSQSLSRRESPSPSHQARPGVPPPRGVPPARAQPDGTPSPGGSKKGPRGKLQAQRATTKGRAGGAEGRAGAR

SEQ ID NO: 2254 - protein, 671 aa, Homo sapiens
MQPDMSLNVIKMKSSDFLESAELDSGGFGKVSLCFHRTQGLMIMKTVYKGPNCIEHNEALLEEAKMMNRLRHSRVVKLLGVIIEEGKYSLVMEYMEKGNLMHVLKAEMSTPLSVKGRIILEIIEGMCYLHGKGVIHKDLKPENILVDNDFHIKIADLGLASFKMWSKLNNEEHNELREVDGTAKKNGGTLYYMAPEHLNDVNAKPTEKSDVYSFAVVLWAIFANKEPYENAICEQQLIMCIKSGNRPDVDDITEYCPREIISLMKLCWEANPEARPTFPGIEEKFRPFYLSQLEESVEEDVKSLKKEYSNENAVVKRMQSLQLDCVAVPSSRSNSATEQPGSLHSSQGLGMGPVEESWFAPSLEHPQEENEPSLQSKLQDEANYHLYGSRMDRQTKQQPRQNVAYNREEERRRRVSHDPFAQQRPYENFQNTEGKGTAYSSAASHGNAVHQPSGLTSQPQVLYQNNGLYSSHGFGTRPLDPGTAGPRVWYRPIPSHMPSLHNIPVPETNYLGNTPTMPFSSLPPTDESIKYTIYNSTGIQIGAYNYMEIGGTSSSLLDSTNTNFKEEPAAKYQAIFDNTTSLTDKHLDPIRENLGKHWKNCARKLGFTQSQIDEIDHDYERDGLKEKVYQMLQKWVMREGIKGATVGKLAQALHQCSRIDLLSSLIYVSQN

SEQ ID NO: 2255 - protein, 1103 aa, Homo sapiens
MQRVAWHINDMKRKHEHAVRLQEIQSLLTNWKGPDLTSYGELVLEGTFRIQRAKNERTLFLFDKLLLITKKRDDTFTYKAHILCGNLMLVEVIPKEPLSFSVFHYKNPKLQHTVQAKSQQDKRLWVLHLKRLILENHAAKIPAKAKQAILEMDAIHHPGFCYSPEGGTKALFGSKEGSAPYRLRRKSEPSSRSHKVLKTSETAQDIQKVSREEGSPQLSSARPSPAQRNSQPSSSTMISVLRAGGALRNIWTDHQIRQALFPSRRSPQENEDDEDDYQMFVPSFSSSDLNSTRLCEDSTSSRPCSWHMGQMESTETSSSGHRIVRRASSAGESNTCPPEIGTSDRTRELQNSPKTEGQEEMTPFGSSIELTIDDIDHVYDNISYEDLKLMVAKREEAESTPSKSARDSVRPKSTPELAFTKRQAGHSKGSLYAQTDGTLSGGEASSQSTHELQAVEENIYDTIGLPDPPSLGFKCSSLKRAKRSTFLGLEADFVCCDSLRPFVSQDSLQLSEDEAPYHQATPDHGYLSLLYDSPSGNLSMPHKPVSDKLSEEVDEIWNDLENYIKKNEDKARDRLLAAFPVSKDDVPDRLHAESTPELSRDVGRSVSTLSLPESQALLTPVKSRAGRASRANCPFEEDLISKEGSFMSLNRLSLASEMPLMDNPYDLANSGLSQTDPENPDLGMEATDKTKSRVFMMARQYSQKIKKANQLLKVKSLELEQPPASQHQKSMHKDLAAILEEKKQGGPAIGARIAEYSQLYDQIVFRESPLKIQKDGWASPQESSLLRSVSPSQVHHGSGDWLLHSTYSNGELADFCLPPEQDLRSRYPTFEINTKSTPRQLSAACSVPSLQTSDPLPGSVQRCSVVVSQPNKENWCQDHLYNSLGRKGISAKSQPYHRSQSSSSVLINKSMDSINYPSDVGKQQLLSLHRSSRCESHQDLLPDIADSHQQGTEKLSDLTLQDSQKVVVVNRNLPLNAQIATQNYFSNFKETDGDEDDYVEIKSEEDESELELSHNRRRKSDSKFVDADFSDNVCSGNTLHSLNSPRTPKKPVNSKLGLSPYLTPYNDSDKLNDYLWRGPSPNQQNIVQSLREKFQCLSSSSFA

SEQ ID NO: 2256 - protein, 697 aa, Homo sapiens
MAETSPEPSGQLVVHSDAHSDTVLASFEDQRKKGFLCDITLIVENVHFRAHKALLAASSEYFSMMFAEEGEIGQSIYMLEGMVADTFGILLEFIYTGYLHASEKSTEQILATAQFLKVYDLVKAYTDFQNNHSSPKPTTLNTAGAPVVVISNKKNDPPKRKRGRPKKVNTLQEEKSELAAEEEIQLRVNNSVQNRQNFVVKGDSGVLNEQIAAKEKEESEPTCEPSREEEMPVEKDENYDPKTEDGQASQSRYSKRRIWRSVKLKDYKLVGDQEDHGSAKRICGRRKRPGGPEARCKDCGKVFKYNHFLAIHQRSHTGERPFKCNECGKGFAQKHSLQVHTRMHTGERPYTCTVCSKALTTKHSLLEHMSLHSGQKSFTCDQCGKYFSQNRQLKSHYRVHTGHSLPECKDCHRKFMDVSQLKKHLRTHTGEKPFTCEICGKSFTAKSSLQTHIRIHRGEKPYSCGICGKSFSDSSAKRRHCILHTGKKPFSCPECNLQFARLDNLKAHLKIHSKEKHASDASSISGSSNTEEVRNILQLQPYQLSTSGEQEIQLLVTDSVHNINFMPGPSQGISIVTAESSQNMTADQAANLTLLTQQPEQLQNLILSAQQEQTEHIQSLNMIESQMGPSQTEPVHVITLSKETLEHLHAHQEQTEELHLATSTSDPAQHLQLTQEPGPPPPTHHVPQPTPLGQEQS

SEQ ID NO: 2257 - protein, 944 aa, Homo sapiens
MALLGKRCDVPTNGCGPDRWNSAFTRKDEIITSLVSALDSMCSALSKLNAEVACVAVHDESAFVVGTEKGRMFLNARKELQSDFLRFCRGPPWKDPEAEHPKKVQRGEGGGRSLPRSSLEHGSDVYLLRKMVEEVFDVLYSEALGRASVVPLPYERLLREPGLLAVQGLPEGLAFRRPAEYDPKALMAILEHSHRIRFKLKRPLEDGGRDSKALVELNGVSLIPKGSRDCGLHGQAPKVPPQDLPPTATSSSMASFLYSTALPNHAIRELKQEAPSCPLAPSDLGLSRPMPEPKATGAQDFSDCCGQKPTGPGGPLIQNVHASKRILFSIVHDKSEKWDAFIKETEDINTLRECVQILFNSRYAEALGLDHMVPVPYRKIACDPEAVEIVGIPDKIPFKRPCTYGVPKLKRILEERHSIHFIIKRMFDERIFTGNKFTKDTTKLEPASPPEDTSAEVSRATVLDLAGNARSDKGSMSEDCGPGTSGELGGLRPIKIEPEDLDIIQVTVPDPSPTSEEMTDSMPGHLPSEDSGYGMEMLTDKGLSEDARPEERPVEDSHGDVIRPLRKQVELLFNTRYAKAIGISEPVKVPYSKFLMHPEELFVVGLPEGISLRRPNCFGIAKLRKILEASNSIQFVIKRPELLTEGVKEPIMDSQERDSGDPLVDESLKRQGFQENYDARLSRIDIANTLREQVQDLFNKKYGEALGIKYPVQVPYKRIKSNPGSVIIEGLPPGIPFRKPCTFGSQNLERILAVADKIKFTVTRPFQGLIPKPDEDDANRLGEKVILREQVKELFNEKYGEALGLNRPVLVPYKLIRDSPDAVEVTGLPDDIPFRNPNTYDIHRLEKILKAREHVRMVIINQLQPFAEICNDAKVPAKDSSIPKRKRKRVSEGNSVSSSSSSSSSSSSNPDSVASANQISLVQWPMYMVDYAGLNVQLPGPLNY

SEQ ID NO: 2258 - protein, 338 aa, Homo sapiens
MLSALARPASAALRRSFSTSAQNNAKVAVLGASGGIGQPLSLLLKNSPLVSRLTLYDIAHTPGVAADLSHIETKAAVKGYLGPEQLPDCLKGCDVVVIPAGVPRKPGMTRDDLFNTNATIVATLTAACAQHCPEAMICVIANPVNSTIPITAEVFKKHGVYNPNKIFGVTTLDIVRANTFVAELKGLDPARVNVPVIGGHAGKTIIPLISQCTPKVDFPQDQLTALTGRIQEAGTEVVKAKAGAGSATLSMAYAGARFVFSLVDAMNGKEGVVECSFVKSQETECTYFSTPLLLGKKGIEKNLGIGKVSSFEEKMISDAIPELKASIKKGEDFVKTLK

SEQ ID NO: 2259 - protein, 1039 aa, Homo sapiens
MEPNDSTSTAVEEPDSLEVLVKTLDSQTRTFIVGAQMNVKEFKEHIAASVSIPSEKQRLIYQGRVLQDDKKLQEYNVGGKVIHLVERAPPQTHLPSGASSGTGSASATHGGGSPPGTRGPGASVHDRNANSYVMVGTFNLPSDGSAVDVHINMEQAPIQSEPRVRLVMAQHMIRDIQTLLSRMETLPYLQCRGGPQPQHSQPPPQPPAVTPEPVALSSQTSEPVESEAPPREPMEAEEVEERAPAQNPELTPGPAPAGPTPAPETNAPNHPSPAEYVEVLQELQRLESRLQPFLQRYYEVLGAAATTDYNNNHEGREEDQRLINLVGESLRLLGNTFVALSDLRCNLACTPPRHLHVVRPMSHYTTPMVLQQAAIPIQINVGTTVTMTGNGTRPPPTPNAEAPPPGPGQASSVAPSSTNVESSAEGAPPPGPAPPPATSHPRVIRISHQSVEPVVMMHMNIQDSGTQPGGVPSAPTGPLGPPGHGQTLGQQVPGFPTAPTRVVIARPTPPQARPSHPGGPPVSGTLQGAGLGTNASLAQMVSGLVGQLLMQPVLVAQGTPGMAPPPAPATASASAGTTNTATTAGPAPGGPAQPPPTPQPSMADLQFSQLLGNLLGPAGPGAGGSGVASPTITVAMPGVPAFLQGMTDFLQATQTAPPPPPPPPPPPPAPEQQTMPPPGSPSGGAGSPGGLGLESLSPEFFTSVVQGVLSSLLGSLGARAGSSESIAAFIQRLSGSSNIFEPGADGALGFFGALLSLLCQNFSMVDVVMLLHGHFQPLQRLQPQLRSFFHQHYLGGQEPTPSNIRMATHTLITGLEEYVRESFSLVQVQPGVDIIRTNLEFLQEQFNSIAAHVLHCTDSGFGARLLELCNQGLFECLALNLHCLGGQQMELAAVINGRIRRMSRGVNPSLVSWLTTMMGLRLQVVLEHMPVGPDAILRYVRRVGDPPQPLPEEPMEVQGAERASPEPQRENASPAPGTTAEEAMSRGPPPAPEGGSRDEQDGASAETEPWAAAVPPGMGPYYPAGHSEPAEGETAAPSE

SEQ ID NO: 2260 - protein, 886 aa, Homo sapiens [sequence omitted]

SEQ ID NO: 2261 - protein, 444 aa, Homo sapiens
MSSSYDEASLAPEETTDSFWEVGNYKRTVKRIDDGHRLCNDLMNCVQERAKIEKAYGQQLTDWAKRWRQLIEKGPQYGSLERAWGAIMTEADKVSELHQEVKNNLLNEDLEKVKNWQKDAYHKQIMGGFKETKEAEDGFRKAQKPWAKKMKELEAAKKAYHLACKEEKLAMTREMNSKTEQSVTPEQQKKLQDKVDKCKQDVQKTQEKYEKVLEDVGKTTPQYMENMEQVFEQCQQFEEKRLVFLKEVLLDIKRHLNLAENSSYIHVYRELEQAIRGADAQEDLRWFRSTSGPGMPMNWPQFEEWNPDLPHTTTKKEKQPKKAEGVALTNATGAVESTSQAGDRGSVSSYDRGQPYATEWSDDESGNPFGGSETNGGANPFEDDSKGVRVRALYDYDGQEQDELSFKAGDELTKLGEEDEQGWCRGRLDSGQLGLYPANYVEAI

SEQ ID NO: 2262 - protein, 542 aa, Homo sapiens
MPLRDETLREVWASDSGHEEESLSPEAPRRPKQRPAPAQRLRKKRTEAPESPCPTGSKPRKPGAGRTGRPREEPSPDPAQARAPQTVYARFLRDPEAKKRDPRETFLVARAPDAEDEEEEEEEDEEDEEEEAEEKKEKILLPPKKPLREKSSADLKERRAKAQGPRGDLGSPDPPPKPLRVRNKEAPAGEGTKMRKTKKKGSGEADKDPSGSPASARKSPAAMFLVGEGSPDKKALKKKGTPKGARKEEEEEEEAATVIKKSNQKGKAKGKGKKVGKEERAPSPPVEVDEPREFVLRPAPQGRTVRCRLTRDKKGMDRGMYPSYFLHLDTEKKVFLLAGRKRKRSKTANYLISIDPTNLSRGGENFIGKLRSNLLGNRFTVFDNGQNPQRGYSTNVASLRQELAAVIYETNVLGFRGPRRMTVIIPGMSAENERVPIRPRNASDGLLVRWQNKTLESLIELHNKPPVWNDDSGSYTLNFQGRVTQASVKNFQIVHADDPDYIVLQFGRVAEDAFTLDYRYPLCALQAFAIALSSFDGKLACE

SEQ ID NO: 2263 - protein, 367 aa, Homo sapiens
MSLIRKKGFYKQDVNKTAWELPKTYVSPTHVGSGAYGSVCSAIDKRSGEKVAIKKLSRPFQSEIFAKRAYRELLLLKHMQHENVIGLLDVFTPASSLRNFYDFYLVMPFMQTDLQKIMGMEFSEEKIQYLVYQMLKGLKYIHSAGVVHRDLKPGNLAVNEDCELKVKILDFGLARHADAEMTGYVVTRWYRAPEVILSWMHYNQTVDIWSVGCIMAEMLTGKTLFKGKDYLDQLTQILKVTGVPGTEFVQKLNDKAAKSYIQSLPQTPRKDFTQLFPRASPQAADLLEKMLELDVDKRLTAAQALTHPFFEPFRDPEEETEAQQPFDDSLEHEKLTVDEWKQHIYKEIVNFSPIARKDSRRRSGMKL

SEQ ID NO: 2264 - protein, 474 aa, Homo sapiens [sequence omitted]

SEQ ID NO: 2265 - protein, 1788 aa, Homo sapiens
MKRKERIARRLEGIENDTQPILLQSCTGLVTHRLLEEDTPRYMRASDPASPHIGRSNEEEETSDSSLEKQTRSKYCTETSGVHGDSPYGSGTMDTHSLESKAERIARYKAERRRQLAEKYGLTLDPEADSEYLSRYTKSRKEPDAVEKRGGKSDKQEESSRDASSLYPGTETMGLRTCAGESKDYALHVGDGSSDPEVLLNIENQRRGQELSATRQAHDLSPAAESSSTFSFSGRDSSFTEVPRSPKHAHSSSLQQAASRSPSFGDPQLSPEARPRCTSHSETPTVDDEEKVDERAKLSVAAKRLLFREMEKSFDEQNVPKRRSRNTAVEQRLRRLQDRSLTQPITTEEVVIAATLQASAHQKALAKDQTNEGKELAEQGEPDSSTLSLAEKLALFNKLSQPVSKAISTRNRIDTRQRRMNARYQTQPVTLGEVEQVQSGKLIPFSPAVNTSVSTVASTVAPMYAGDLRTKPPLDHNASATDYKFSSSIENSDSPVRSILKSQAWQPLVEGSENKGMLREYGETESKRALTGRDSGMEKYGSFEEAEASYPILNRAREGDSHKESKYAVPRRGSLERANPPITHLGDEPKEFSMAKMNAQGNLDLRDRLPFEEKVEVENVMKRKFSLRAAEFGEPTSEQTGTAAGKTIAQTTAPVSWKPQDSSEQPQEKLCKNPCAMFAAGEIKTPTGEGLLDSPSKTMSIKERLALLKKSGEEDWRNRLSRRQEGGKAPASSLHTQEAGRSLIKKRVTESRESQMTIEERKQLITVREEAWKTRGRGAANDSTQFTVAGRMVKKGLASPTAITPVASPICGKTRGTTPVSKPLEDIEARPDMQLESDLKLDRLETFLRRLNNKVGGMHETVLTVTGKSVKEVMKPDDDETFAKFYRSVDYNMPRSPVEMDEDFDVIFDPYAPKLTSSVAEHKRAVRPKRRVQASKNPLKMLAAREDLLQEYTEQRLNVAFMESKRMKVEKMSSNSNFSEVTLAGLASKENFSNVSLRSVNLTEQNSNNSAVPYKRLMLLQIKGRRHVQTRLVEPRASALNSGDCFLLLSPHCCFLWVGEFANVIEKAKASELATLIQTKRELGCRATYIQTIEEGINTHTHAAKDFWKLLGGQTSYQSAGDPKEDELYEAAIIETNCIYRLMDDKLVPDDDYWGKIPKCSLLQPKEVLVFDFGSEVYVWHGKEVTLAQRKIAFQLAKHLWNGTFDYENCDINPLDPGECNPLIPRKGQGRPDWAIFGRLTEHNETILFKEKFLDWTELKRSNEKNPGELAQHKEDPRTDVKAYDVTRMVSMPQTTAGTILDGVNVGRGYGLVEGHDRRQFEITSVSVDVWHILEFDYSRLPKQSIGQFHEGDAYVVKWKFMVSTAVGSRQKGEHSVRAAGKEKCVYFFWQGRHSTVSEKGTSALMTVELDEERGAQVQVLQGKEPPCFLQCFQGGMVVHSGRREEEEENVQSEWRLYCVRGEVPVEGNLLEVACHCSSLRSRTSMVVLNVNKALIYLWHGCKAQAHTKEVGRTAANKIKEQCPLEAGLHSSSKVTIHECDEGSEPLGFWDALGRRDRKAYDCMLQDPGSFNFAPRLFILSSSSGDFAATEFVYPARAPSVVSSMPFLQEDLYSAPQPALFLVDNHHEVYLWQGWWPIENKITGSARIRWASDRKSAMETVLQYCKGKNLKKPAPKSYLIHAGLEPLTFTNMFPSWEHREDIAEITEMDTEVSNQITLVEDVLAKLCKTIYPLADLLARPLPEGVDPLKLEIYLTDEDFEFALDMTRDEYNALPAWKQVNLKKAKGLF

SEQ ID NO: 2266 - protein, 116 aa, Homo sapiens
MRIRTEGLRPSCLGAKHLLWDVAAEEGKAEGADSTASWGVVKASCGGPSLAAKWRTAPSMPGFVTRSFSMLSCWHIAAQLEMYGCPHLDLTESEVQPQERSLHPLGFLCSANTSGI

SEQ ID NO: 2267 - protein, 1646 aa, Homo sapiens
MWHGNHVQPGATHRPNQGLEMLQGLGIGMKAFHNFNYFLFFYNVLLGLGACLSRLLISCLLGMWLIARIDRTIMQSGYEGADMGFSAWIGMLYMDHYHINPVLVSFCHILITNHREKKLQQSTKYWCLNQSAESLRICAMRGGENRPPARVQSSSEELELRHQSLDAFPGRRLPGRGIQPAAKMSSVGKVTQVPNGKAYQQIFQAEVQLVHSLAATRKRAAERSVTLKSGRIPMMKKVETPEGEVMSPRQQKWMHSLPNDWIMENPVLHREKERAKREKARESENTIAAREVRGLMDTIVPEKISTSTFQRQAEHKRKSYESALASFQEEIAQVGKEMEPLIVDTGGLFLKKLTESDEEMNRLFLKVENDTNLEDYTIQALLELWDKVAGRLLLRKQEIKELDEALHSLEFSRTDKLKSVLKKYAEVIEKTSYLMRPEVYRLINEEAMVMNYALLGNRKALAQLFVNLMESTLQQELDSRHRWQGLVDTWKALKKEALLQSFSEFMASESIHTPPAVTKELEVMLKTQNVLQQRRLKHLCTICDLLPPSYSKTQLTEWHSSLNSLNKELDTYHVDCMMRIRLLYEKTWQECLMHVQNCKKQLLDWKAFTEEEAETLVNQFFFQMVGALQGKVEEDLELLDKSFETLADQTEWQSSHLFKYFQEVVQLWEAHQSELLVQELELEKRMEQHRQKHSLESQVQEAHLDRLLDQLRQQSDKETLAFHLEKVKDYLKNMKSRYECFHTLLTKEVMEYPAIMLKELNSYSSALSQYFFVREIFEQNLAGEVIFKFRQPEAHEKPSQKRVKKLRKKQGSKEDMTRSEESISSGTSTARSVEEVEEENDQEMESFITEEVLGQQKKSPLHAKMDESKEGSIQGLEEMQVEREGSLNPSLNEENVKGQGEKKEESEEEDEKEEEEEEEKLEEEKEEKEAQEEQESLSVGEEEDKEEGLEEIYYEDMESFTISSGNTYFVFVPLEEEHCRKSHSTFSAMFINDTSSAKFIEQVTIPSRLILEIKKQLFSEGGNFSPKEINSLCSRLEKEAARIELVESVIMLNMEKLENEYLDQANDVINKFESKFHNLSVDLIFIEKIQRLLTNLQVKIKCQVAKSNSQTNGLNFSLQQLQNKIKTCQESRGEKTTVTTEELLSFVQTWKEKLSQRIQYLNCSLDRVSMTELVFTNTILKDQEEDSDILTSSEALEEEAKLDVVTPESFTQLSRVGKPLIEDPAVDVIRKLLQLPNTKWPTHHCDKDPSQTGFKRHRCQPENSGKKAVPSASATSAGSLQTTHPPLSHSFTPHPKPNKMERKYRVLGDKPPPAAEDFKGIILTLLWESSENLLTVAEEFYRKEKRPVTRPDCMCDTFDQCAENISKKILEYQSQANKYHNSCLIELRIQIRRFEELLPQVCWLVMENFKEHHWKKFFTSVKEIRGQFEEQQKRLEKRKDKNAQKLHLNLGHPVHFQEMESLHLSEEERQEELDSMIRMNKEKLEECTRRNGQVFITNLATFTEKFLLQLDEVVTIDDVQVARMEPPKQKLSMLIRRKLAGLSLKEESEKPLIERGSRKWPGIKPTEVTIQNKILLQPTSSISTTKTTLGHLAAVEARDAVYLKYLASFEEELKRIQDDCTSQIKEAQRWKDSWKQSLHTIQGLYV

SEQ ID NO: 2268 - protein, 208 aa, Homo sapiens
MSTGGDFGNPLRKFKLVFLGEQSVGKTSLITRFMYDSFDNTYQATIGIDFLSKTMYLEDRTIRLQLWDTAGQERFRSLIPSYIRDSAAAVVVYDITNVNSFQQTTKWIDDVRTERGSDVIIMLVGNKTDLADKRQVSIEEGERKAKELNVMFIETSAKAGYNVKQLFRRVAAALPGMESTQDRSREDMIDIKLEKPQEQPVSEGGCSC

SEQ ID NO: 2269 - protein, 714 aa, Homo sapiens
MVTRLLQQQNLPQTGEQELESLVLKLSVLKDFLSGIQKKALKALQDMSSTAPPAPQPSTRKAKTIPVQAFEVKLDVTLGDLTKIGKSQKFTLSVDVEGGRLVLLRRQRDSQEDWTTFTHDRIRQLIKSQRVQNKLGVVFEKEKDRTQRKDFIFVSARKREAFCQLLQLMKNKHSKQDEPDMISVFIGTWNMGSVPPPKNVTSWFTSKGLGKTLDEVTVTIPHDIYVFGTQENSVGDREWLDLLRGGLKELTDLDYRPIAMQSLWNIKVAVLVKPEHENRISHVSTSSVKTGIANTLGNKGAVGVSFMFNGTSFGFVNCHLTSGNEKTARRNQNYLDILRLLSLGDRQLNAFDISLRFTHLFWFGDLNYRLDMDIQEILNYISRKEFEPLLRVDQLNLEREKHKVFLRFSEEEISFPPTYRYERGSRDTYAWHKQKPTGVRTNVPSWCDRILWKSYPETHIICNSYGCTDDIVTSDHSPVFGTFEVGVTSQFISKKGLSKTSDQAYIEFESIEAIVKTASRTKFFIEFYSTCLEEYKKSFENDAQSSDNINFLKVQWSSRQLPTLKPILADIEYLQDQHLLLTVKSMDGYESYGECVVALKSMIGSTAQQFLTFLSHRGEETGNIRGSMKVRVPTERLGTRERLYGGSALIRMRQEQRAKPPLCPEGARSPGQGAASQPSQRPPARSPGYLKNQRNRHQRGGPQPHPEQLPGRSP

SEQ ID NO: 2270 - protein, 149 aa, Homo sapiens
MKVRKSSTPEEVKKRKKAVLFCLSEDKKNIILEEGKEILVGDVGQTVDDPYATFVKMLPDKDCRYALYDATYETKESKKEDLVFIFWAPESAPLKSKMIYASSKDAIKKKLTGIKHELQANCYEEVKDRCTLAEKLGGSAVISLEGKPL

SEQ ID NO: 2271 - protein, 388 aa, Homo sapiens
  VARIANT 68, 69, 70, 71, 72, 73, 74, 75, 76, 77, 78, 79, 80, 81, 82,83, 84, 85, 86, 87, 88, 89, 90, 91, 92, 93, 94, 95, 96,97, 98, 99, 100, 101, 102, 103, 104, 105, 106, 107, 108,109, 110, 111, 112, 113, 114, 115, 116, 117, 118: Xaa = Any Amino Acid
MESGEHAGLGVQFPQAGEAQNGRRRSRMDEATWYLDSDDSSPLGSPSTPPALNGNPPRPSLEPEEPKXXXXXXXXXXXXXXXXXXXXXXXXXXXXXXXXXXXXXXXXXXXXXXXXXXXTTPPTPTPAPCPTEPPLPRSSASRSRRPTPRPLLHPCCWTWVSLWASGQPRAPDVRRSPAEALSHPHRGHHALLLAPQAPHVHHPWASSADLGPRPFAAALIPGALCQLGHGLLPCHHHSLHPAEHPGPCSRTQTPSGTPHLPTPSRGAPRTAGHRPKTWVPRPRGCRKRGLEWARPLPRAPAALGGVTAYTGTGAGSASAAASVSPGTPPPFGGQEHYTAQEAFTLEGGPAPPHLKPVGPPSSPALLGPNTVPSWLGGPEPVSGNCLLG

SEQ ID NO: 2272 - protein, 1189 aa, Homo sapiens
MKTRQNKDSMSMRSGRKKEAPGPREELRSRGRASPGGVSTSSSDGKAEKSRQTAKKARVEEASTPKVNKQGRSEEISESESEETNAPKKTKTEELPRPQSPSDLDSLDGRSLNDDGSSDPRDIDQDNRSTSPSIYSPGSVENDSDSSSGLSQGPARPYHPPPLFPPSPQPPDSTPRQPEASFEPHPSVTPTGYHAPMEPPTSRMFQAPPGAPPPHPQLYPGGTGGVLSGPPMGPKGGGAASSVGGPNGGKQHPPPTTPISVSSSGASGAPPTKPPTTPVGGGNLPSAPPPANFPHVTPNLPPPPALRPLNNASASPPGLGAQPLPGHLPSPHAMGQGMGGLPPGPEKGPTLAPSPHSLPPASSSAPAPPMRFPYSSSSSSSAAASSSSSSSSSSASPFPASQALPSYPHSFPPPTSLSVSNQPPKYTQPSLPSQAVWSQGPPPPPPYGRLLANSNAHPGPFPPSTGAQSTAHPPVSTHHHHHQQQQQQQQQQQQQQQQQQQHHGNSGPPPPGAFPHPLEGGSSHHAHPYAMSPSLGSLRPYPPGPAHLPPPHSQVSYSQAGPNGPPVSSSSNSSSSTSQGSYPCSHPSPSQGPQGAPYPFPPVPTVTTSSATLSTVIATVASSPAGYKTASPPGPPPYGKRAPSPGAYKTATPPGYKPGSPPSFRTGTPPGYRGTSPPAGPGTFKPGSPTVGPGPLPPAGPSGLPSLPPPPAAPASGPPLSATQIKQEPAEEYETPESPVPPARSPSPPPKVVDVPSHASQSARFNKHLDRGFNSCARSDLYFVPLEGSKLAKKRADLVEKVRREAEQRAREEKEREREREREKEREREKERELERSVKLAQEGRAPVECPSLGPVPHRPPFEPGSAVATVPPYLGPDTPALRTLSEYARPHVMSPGNRNHPFYVPLGAVDPGLLGYNVPALYSSDPAAREREREARERDLRDRLKPGFEVKPSELEPLHGVPGPGLDPFPRHGGLALQPGPPGLHPFPFHPSLGPLERERLALAAGPALRPDMSYAERLAAERQHAERVAALGNDPLARLQMLNVTPHHHQHSHIHSHLHLHQQDAIHAASASVHPLIDPLASGSHLTRIPYPAGTLPNPLLPHPLHENEVLRHQLFAAPYRDLPASLSAPMSAAHQLQAMHAQSAELQRLALEQQQWLHAHHPLHSVPLPAQEDYYSHLKKESDKPL

SEQ ID NO: 2273 - protein, 858 aa, Homo sapiens
MAELSEEALLSVLPTIRVPKAGDRVHKDECAFSFDTPESEGGLYICMNTFLGFGKQYVERHFNKTGQRVYLHLRRTRRPKEEDPATGTGDPPRKKPTRLAIGVEGGFDLSEEKFELDEDVKIVILPDYLEIARDGLGGLPDIVRDRVTSAVEALLSADSASRKQEVQAWDGEVRQVSKHAFSLKQLDNPARIPPCGWKCSKCDMRENLWLNLTDGSILCGRRYFDGSGGNNHAVEHYRETGYPLAVKLGTITPDGADVYSYDEDDMVLDPSLAEHLSHFGIDMLKMQKTDKTMTELEIDMNQRIGEWELIQESGVPLKPLFGPGYTGIRNLGNSCYLNSVVQVLFSIPDFQRKYVDKLEKIFQNAPTDPTQDFSTQVAKLGHGLLSGEYSKPVPESGDGERVPEQKEVQDGIAPRMFKALIGKGHPEFSTNRQQDAQEFFLHLINMVERNCRSSENPNEVFRFLVEEKIKCLATEKVKYTQRVDYIMQLPVPMDAALNKEELLEYEEKKRQAEEEKMALPELVRAQVPFSSCLEAYGAPEQVDDFWSTALQAKSVAVKTTRFASFPDYLVIQIKKFTFGLDWVPKKLDVSIEMPEELDISQLRGTGLQPGEEELPDIAPPLVTPDEPKGSLGFYGNEDEDSFCSPHFSSPTSPMLDESVIIQLVEMGFPMDACRKAVYYTGNSGAEAAMNWVMSHMDDPDFANPLILPGSSGPGSTSAAADPPPEDCVTTIVSMGFSRDQALKALRATNNSLERAVDWIFSHIDDLDAEAAMDISEGRSAADSISESVPVGPKVRDGPGKYQLFAFISHMGTSTMCGHYVCHIKKEGRWVIYNDQKVCASEKPPKDLGYIYFYQRVAS

SEQ ID NO: 2274 - protein, 148 aa, Homo sapiens
MQVGRCRFSIRMSCCRSCFSSSIWVFSSAFMSSSRSDSRCRNSVRSFFLFRHRAAATLFFSRRLFLRSSSSSSSLFTGWGLLPSFTSRKCKGAIMAPRLRMSAYFSSSTVRAELGSPVRGPSPGREPVVTEGSGICPGIIAGGVAGQP

SEQ ID NO: 2275 - protein, 541 aa, Homo sapiens
MFSWMGRQAGGRERAGGADAVQTVTGGLRSLYLRKVLPLEEAYRFHEFHSPALEDADFENKPMILLVGQYSTGKTTFIRYLLEQDFPGMRIGPEPTTDSFIAVMYGETEGSTPGNALVVDPKKPFRKLSRFGNAFLNRFMCSQLPNQVLKSISVIDSPGILSGEKQRISRGYDFCQVLQWFAERVDRIILLFDAHKLDISDEFSEAIKAFRGQDDKIRVVLNKADQVDTQQLMRVYGALMWSLGKVINTPEVLRVYIGSFWAQPLQNTDNRRLFEAEAQDLFRDIQSLPQKAAVRKLNDLIKRARLAKVHAYIISYLKKEMPSVFGKENKKRELISRLPEIYIQLQREYQISAGDFPEVKAMQEQLENYDFTKFHSLKPKLIEAVDNMLSNKISPLMNLISQEETSTPTQLVQGGAFDGTTEGPFNQGYGEGAKEGADEEEWVVAKDKPVYDELFYTLSPINGKISGVNAKKEMVTSKLPNSVLGKIWKLADCDCDGMLDEEEFALAKHLIKIKLDGYELPSSLPPHLVPPSHRKSLPKAD

SEQ ID NO: 2276 - protein, 1694 aa, Homo sapiens
MDETGEISRGPDVHLTHGLEPKDVNREFRLTESSTCEPSTVAAVLSRAQGCRSPSAPDVRTGSFSHSATDGSVGLIGVPEKKVAEKQASTELEAASFPAGMYSEPLRQFRDSSVGDQNAQVCQTNPEPPATTQGPHTLDLSEGSAESKLVVEPQHECLENTTRCFLEKPQFSTELRDHNRLDSQAKFVARLKHTCSPQEDSPWQEEEQHRDQASGGGEGFAQGVNPLPDEDGLDGCQILDAGREEVAVAKPPVSKILSQGFKDPATVSLRQNETPQPAAQRSGHLYTGREQPAPNHRGSLPVTTIFSGPKHSRSSPTPQFSVVGSSRSLQELNLSVEPPSPTDEDTQGPNRLWNPHLRGYSSGKSVARTSLQAEDSNQKASSRLDDGTTDHRHLKPATPPYPMPSTLSHMPTPDFTTSWMSGTLEQAQQGKREKLGVQVRPENWCSQMDKGMLHFGSSDISPYALPWRPEEPARISWKQYMSGSAVDVSCSQKPQGLTLSNVARCSSMDNGLEDQNSPFHSHLSTYANICDLSTTHSSTENAQGSNEAWEVFRGSSSIALGDPHIPTSPEGVAPTSGHDRRPQFRGPSGEADCLRSKPPLAKGSAAGPVDEIMLLYPSEAGCPVGQTRTNTFEQGTQTLGSRRHWSSTDISFAQPEASAVSAFDLASWTSMHNLSLHLSQLLHSTSELLGSLSQPDVARREQNTKRDIPDKAPQALMMDGSTQTTVDEGSQTDLTLPTLCLQTSEAEPQGANVILEGLGSDTSTVSQEEGDVPGVPQKREAEETAQKMAQLLYLQEESTPYKPQSPSIPSSHLRFQKAPVGQHLPSVSPSVSDAFLPPSSQPEESYCLVVSSPSPSSPHSPGLFPSTSEYPGDSRVQKKLGPTSALFVDRASSPILTLSASTQEPGLSPGSLTLSAPSTHPVEGHQKLDSSPDPVDAPRTPMDNYSQTTDELGGSQRGRSSLQRSNGRSFLELHSPHSPQQSPKLQFSFLGQHPQQLQPRTTIGVQSRLLPPPLRHRSQRLGNSFVPEKVASPEHCPLSGREPSQWQSRTENGGESSASPGEPQRTLDRPSSWGGLQHLSPCPVSELTDTAGLRGSALGLPQACQPEELLCFSCQMCMAPEHQHHSLRDLPVHNKFSNWCGVQKGSPGGLDMTEEELGASGDLSSEKQEQSPPQPPNDHSQDSEWSKREQIPLQVGAQNLSLSVELTEAKLHHGFGEADALLQVLQSGTGEALAADEPVTSTWKELYARQKKAIETLRRERAERLGNFCRTRSLSPQKQLSLLPNKDLFIWDLDLPSRRREYLQQLRKDVVETTRSPESVSRSAHTPSDIELMLQDYQQAHEEAKVEIARARDQLRERTEQEKLRIHQKIISQLLKEEDKLHTLANSSSLCTSSNGSLSSGMTSGYNSSPALSGQLQFPENMGHTNLPDSRDVWIGDERGGHSAVRKNSAYSHRASLGSCCCSPSSLSSLGTCFSSSYQDLAKHVVDTSMADVMAACSDNLHNLFSCQATAGWNYQGEEQAVQLYYKVFSPTRHGFLGAGVVSQPLSRVWAAVSDPTVWPLYYKPIQTARLHQRVTNSISLVYLVCNTTLCALKQPRDFCCVCVEAKEGHLSVMAAQSVYDTSMPRPSRKMVRGEILPSAWILQPITVEGKEVTRVIYLAQVELGAPGFPPQLLSSFIKRQPLVIARLASFLGR

SEQ ID NO: 2277 - protein, 289 aa, Homo sapiens
MMRQRAQERKNEEMEVMEVEDEGRSGEESESESEYEEYTDSEDEMEPRLKPVFIRKKDRVTVQEREAEALKQKELEQEAKRMAEERRKYTLQIVEEETKKELEENKRSLAALDALNTDDENDEEEYEAWKVRELKRIKRDREDREALEKEKAEIERMRNLTEEERRAELRANGKVITNKAVKGKYKFLQKYYHRGAFFMDEDEEVYKRDFSAPTLEDHFNKTILPKVMQVKNFGRSGRTKYTHLVDQDTTSFDSAWGQESAQNTKFFKQKAAGVRDVFERPSAKKRKTT

SEQ ID NO: 2278 - protein, 533 aa, Homo sapiens
MPSCGACTCGAAAVRLITSSLASAQRGISGGRIHMSVLGRLGTFETQILQRAPLRSFTETPAYFASKDGISKDGSGDGNKKSASEGSSKKSGSGNSGKGGNQLRCPKCGDLCTHVETFVSSTRFVKCEKCHHFFVVLSEADSKKSIIKEPESAAEAVKLAFQQKPPPPPKKIYNYLDKYVVGQSFAKKVLSVAVYNHYKRIYNNIPANLRQQAEVEKQTSLTPRELEIRRREDEYRFTKLLQIAGISPHGNALGASMQQQVNQQIPQEKRGGEVLDSSHDDIKLEKSNILLLGPTGSGKTLLAQTLAKCLDVPFAICDCTTLTQAGYVGEDIESVIAKLLQDANYNVEKAQQGIVFLDEVDKIGSVPGIHQLRDVGGEGVQQGLLKLLEGTIVNVPEKNSRKLRGETVQVDTTNILFVASGAFNGLDRIISRRKNEKYLGFGTPSNLGKGRRAAAAADLANRSGESNTHQDIEEKDRLLRHVEARDLIEFGMIPEFVGRLPVVVPLHSLDEKTLVQILTEPPHPALFTIFNPF

SEQ ID NO: 2279 - protein, 603 aa, Homo sapiens
MSAAVTAGKLARAPADPGKAGVPGVAAPGAPAAAPPAKEIPEVLVDPRSRRRYVRGRFLGKGGFAKCFEISDADTKEVFAGKIVPKSLLLKPHQREKMSMEISIHRSLAHQHVVGFHGFFEDNDFVFVVLELCRRRSLLELHKRRKALTEPEARYYLRQIVLGCQYLHRNRVIHRDLKLGNLFLNEDLEVKIGDFGLATKVEYDGERKKTLCGTPNYIAPEVLSKKGHSFEVDVWSIGCIMYTLLVGKPPFETSCLKETYLRIKKNEYSIPKHINPVAASLIQKMLQTDPTARPTINELLNDEFFTSGYIPARLPITCLTIPPRFSIAPSSLDPSNRKPLTVLNKGLENPLPERPREKEEPVVRETGEVVDCHLSDMLQQLHSVNASKPSERGLVRQEEAEDPACIPIFWVSKWVDYSDKYGLGYQLCDNSVGVLFNDSTRLILYNDGDSLQYIERDGTESYLTVSSHPNSLMKKITLLKYFRNYMSEHLLKAGANITPREGDELARLPYLRTWFRTRSAIILHLSNGSVQINFFQDHTKLILCPLMAAVTYIDEKRDFRTYRLSLLEEYGCCKELASRLRYARTMVDKLLSSRSASNRLKAS

SEQ ID NO: 2280 - protein, 912 aa, Homo sapiens
MYFAWLGFYTSAMVYPAVFGSVLYTFTEADQTSRDVSCVVFALFNVIWSTLFLEEWKRRGAELAYKWGTLDSPGEAVEEPRPQFRGVRRISPITRAEEFYYPPWKRLLFQLLVSLPLCLACLVCVFLLMLGCFQLQELVLSVKGLPRLARFLPKVMLALLVSVSAEGYKKLAIWLNDMENYRLESAYEKHLIIKVVLFQFVNSYLSLFYIGFYLKDMERLKELLLVLSLSQSLERQLQAVLVPLAALRFRLLLLSLRGLLLAARAKMLATLLITRQFLQNVREVLQPHLYRRLGRGELGLRAVWELARALLGLLSLRRPAPRRLEPQADEGGGGGSGGGGRRCLSGGCGAPEEEEEAALVERRRAGEGGEEGDGPPGGKEEDEDDEEEEDEEEEEDEEEGEEGGLLDCGLRLKKVSFAERGAGRRRPGPSPEALLEEGSPTMVEKGLEPGVFTLAEEDDEAEGAPGSPEREPPAILFRRAGGEGRDQGPDGGPDPEPGSNSDSTRRQRRQNRSSWIDPPEEEHSPQLTQAELESCMKKYEDTFQDYQEMFVQFGYVVLFSSAFPLAALCALVNNLIEIRSDAFKLCTGLQRPFGQRVESIGQWQKVMEAMGVLAIVVNCYLIGQCGQLQRLFPWLSPEAAIVSVVVLEHFALLLKYLIHVAIPDIPGWVAEEMAKLEYQRREAFKRHERQAQHRYQQQQRRRREEEERQRHAEHHARREHDSGGREEARAEGSGLDPATSSEKASAKAKGSTAGGHGPERPKRPGSLLAPNNVMKLKQIIPLQGKFLSSGATSSLAAAGAGATTRPPPAQSPTGSDTRLPAFLSFKFLKSPETRRDSERSHSPPKAFHAGKLFPFGGTRAEPGSNGAGGQARPDGTPSSGSSRVQRSGPVDEALAEELEAPRPEEEGSGHKL

SEQ ID NO: 2281 - protein, 224 aa, Homo sapiens [sequence omitted]

SEQ ID NO: 2282 - protein, 1415 aa, Homo sapiens
MSGLGENLDPLASDSRKRKLPCDTPGQGLTCSGEKRRREQESKYIEELAELISANLSDIDNFNVKPDKCAILKETVRQIRQIKEQGKTISNDDDVQKADVSSTGQGVIDKDSLGPLLLQALDGFLFVVNRDGNIVFVSENVTQYLQYKQEDLVNTSVYNILHEEDRKDFLKNLPKSTVNGVSWTNETQRQKSHTFNCRMLMKTPHDILEDINASPEMRQRYETMQCFALSQPRAMMEEGEDLQSCMICVARRITTGERTFPSNPESFITRHDLSGKVVNIDTNSLRSSMRPGFEDIIRRCIQRFFSLNDGQSWSQKRHYQEVTSDGIFSPTAYLNGHAETPVYRFSLADGTIVTAQTKSKLFRNPVTNDRHGFVSTHFLQREQNGYRPNPNPVGQGIRPPMAGCNSSVGGMSMSPNQGLQMPSSRAYGLADPSTTGQMSGARYGGSSNIASLTPGPGMQSPSSYQNNNYGLNMSSPPHGSPGLAPNQQNIMISPRNRGSPKIASHQFSPVAGVHSPMASSGNTGNHSFSSSSLSALQAISEGVGTSLLSTLSSPGPKLDNSPNMNITQPSKVSNQDSKSPLGFYCDQNPVESSMCQSNSRDHLSDKESKESSVEGAENQRGPLESKGHKKLLQLLTCSSDDRGHSSLTNSPLDSSCKESSVSVTSPSGVSSSTSGGVSSTSNMHGSLLQEKHRILHKLLQNGNSPAEVAKITAEATGKDTSSITSCGDGNVVKQEQLSPKKKENNALLRYLLDRDDPSDALSKELQPQVEGVDNKMSQCTSSTIPSSSQEKDPKIKTETSEEGSGDLDNLDAILGDLTSSDFYNNSISSNGSHLGTKQQVFQGTNSLGLKSSQSVQSIRPPYNRAVSLDSPVSVGSSPPVKNISAFPMLPKQPMLGGNPRMMDSQENYGSSMGDWGLPNSKAGRMEPMNSNSMGRPGGDYNTSLPRPALGGSIPTLPLRSNSIPGARPVLQQQQQMLQMRPGEIPMGMGANPYGQAAASNQLGSWPDGMLSMEQVSHGTQNRPLLRNSLDDLVGPPSNLEGQSDERALLDQLHTLLSNTDATGLEEIDRALGIPELVNQGQALEPKQDAFQGQEAAVMMDQKAGLYGQTYPAQGPPMQGGFHLQGQSPSFNSMMNQMNQQGNFPLQGMHPRANIMRPRTNTPKQLRMQLQQRLQGQQFLNQSRQALELKMENPTAGGAAVMRPMMQPQQGFLNAQMVAQRSRELLSHHFRQQRVAMMMQQQQQQQQQQQQQQQQQQQQQQQQQQQQQTQAFSPPPNVTASPSMDGLLAGPTMPQAPPQQFPYQPNYGMGQQPDPAFGRVSSPPNAMMSSRMGPSQNPMMQHPQAASIYQSSEMKGWPSGNLARNSSFSQQQFAHQGNPAVYSMVHMNGSSGHMGQMNMNPMPMSGMPMGPDQKYC

SEQ ID NO: 2283 - protein, 372 aa, Homo sapiens
MNRSHRHGAGSGCLGTMEVKSKFGAEFRRFSLERSKPGKFEEFYGLLQHVHKIPNVDVLVGYADIHGDLLPINNDDNYHKAVSTANPLLRIFIQKKEEADYSAFGTDTLIKKKNVLTNVLRPDNHRKKPHIVISMPQDFRPVSSIIDVDILPETHRRVRLYKYGTEKPLGFYIRDGSSVRVTPHGLEKVPGIFISRLVPGGLAQSTGLLAVNDEVLEVNGIEVSGKSLDQVTDMMIANSRNLIITVRPANQRNNVVRNSRTSGSSGQSTDNSLLGYPQQIEPSFEPEDEDSEEDDIIIEDNGVPQQIPKAVPNTESLESLTQIELSFESGQNGFIPSNEVSLAAIASSSNTEFETHAPDQKLLEEDGTIITL

SEQ ID NO: 2284 - protein, 514 aa, Homo sapiens
MSSPISKSRSLAAFLQQLRSPRQPPRLVTSTAYTSPQPREVPVCPLTAGGETQNAAALPGPTSWPLLGSLLQILWKGGLKKQHDTLVEYHKKYGKIFRMKLGSFESVHLGSPCLLEALYRTESAYPQRLEIKPWKAYRDYRKEGYGLLILEGEDWQRVRSAFQKKLMKPGEVMKLDNKINEVLADFMGRIDELCDERGHVEDLYSELNKWSFESICLVLYEKRFGLLQKNAGDEAVNFIMAIKTMMSTFGRMMVTPVELHKSLNTKVWQDHTLAWDTIFKSVKACIDNRLEKYSQQPSADFLCDIYHQNRLSKKELYAAVTELQLAAVETTANSLMWILYNLSRNPQVQQKLLKEIQSVLPENQVPRAEDLRNMPYLKACLKESMRLTPSVPFTTRTLDKATVLGEYALPKGTVLMLNTQVLGSSEDNFEDSSQFRPERWLQEKEKINPFAHLPFGVGKRMCIGRRLAELQLHLALCWIVRKYDIQATDNEPVEMLHSGTLVPSRELPIAFCQR

SEQ ID NO: 2285 - protein, 825 aa, Homo sapiens
MEQLPGVPPGPPHPVRPPPPPPPPMPLQLEAHLRSHGLEPAAPSPRLRPEESLDPPGAMQELLGALEPLPPAPGDTGVGPPNSEGKDPAGAYRSPSPQGTKAPRFVPLTSICFPDSLLQDEERSFFPTMEEMFGGGAADDYGKAGPPEDEGDPKAGAGPPPGPPAYDPYGPYCPGRASGAGPETPGLGLDPNKPPELPSTVNAEPLGLIQSGPHQAAPPPPPPPPPPPAPASEPKGGLTSPIFCSTKPKKLLKTSSFHLLRRRDPPFQTPKKLYAQEYEFEADEDKADVPADIRLNPRRLPDLVSSCRSRPALSPLGDIDFCPPNPGPDGPRRRGRKPTKAKRDGPPRPRGRPRIRPLEVPTTAGPASASTPTDGAKKPRGRGRGRGRKAEEAGGTRLEPLKPLKIKLSVPKAGEGLGTSSGDAISGTDHNSLDSSLTREKIEAKIKEVEEKQPEMKSGFMASFLDFLKSGKRHPPLYQAGLTPPLSPPKSVPPSVPARGLQPQPPATPAVPHPPPSGAFGLGGALEAAESEGLGLGCPSPCKRLDEELKRNLETLPSFSSDEEDSVAKNRDLQESISSAISALDDPPLAGPKDTSTPDGPPLAPAAAVPGPPPLPGLPSANSNGTPEPPLLEEKPPPTPPPAPTPQPQPPPPPPPPQPALPSPPPLVAPTPSSPPPPPLPPPPPPAMPSPPPPPPPAAAPLAAPPEEPAAPSPEDPELPDTRPLHLAKKQETAAVCGETDEEAGESGGEGIFRERDEFVIRAEDIPSLKWRCRRGVNPHPSGESRRPFCRNSLRRSRTARGSFVPPVIIWGILGMQKIGTSASM

SEQ ID NO: 2286 - protein, 3389 aa, Homo sapiens [sequence omitted]

SEQ ID NO: 2287 - protein, 3664 aa, Homo sapiens
MVRETRHLWVGNLPENVREEKIIEHFKRYGRVESVKILPKRGSEGGVAAFVDFVDIKSAQKAHNSVNKMGDRDLRTDYNEPGTIPSAARGLDDTVSIASRSREVSGFRGGGGGPAYGPPPSLHAREGRYERRLDGASDNRERAYEHSAYGHHERGTGGFDRTRHYDQDYYRDPRERTLQHGLYYASRSRSPNRFDAHDPRYEPRAREQFTLPSVVHRDIYRDDITREVRGRRPERNYQHSRSRSPHSSQSRNQSPQRLASQASRPTRSPSGSGSRSRSSSSDSISSSSSTSSDSSDSSSSSSDDSPARSVQSAAVPAPTSQLLSSLEKDEPRKSFGIKVQNLPVRSTDTSLKDGLFHEFKKFGKVTSVQIHGTSEERYGLVFFRQQEDQEKALTASKGKLFFGMQIEVTAWIGPETESENEFRPLDERIDEFHPKATRTLFIGNLEKTTTYHDLRNIFQRFGEIVDIDIKKVNGVPQYAFLQYCDIASVCKAIKKMDGEYLGNNRLKLGFGKSMPTNCVWLDGLSSNVSDQYLTRHFCRYGPVVKVVFDRLKGMALVLYNEIEYAQAAVKETKGRKIGGNKIKVDFANRESQLAFYHCMEKSGQDIRDFYEMLAERREERRASYDYNQDRTYYESVRTPGTYPEDSRRDYPARGREFYSEWETYQGDYYESRYYDDPREYRDYRNDPYEQDIREYSYRQRERERERERFESDRDRDHERRPIERSQSPVHLRRPQSPGASPSQAERLPSDSERRLYSRSSDRSGSCSSLSPPRYEKLDKSRLERYTKNEKTDKERTFDPERVERERRLIRKEKVEKDKTDKQKRKGKVHSPSSQSSETDQENEREQSPEKPRSCNKLSREKADKEGIAKNRLELMPCVVLTRVKEKEGKVIDHTPVEKLKAKLDNDTVKSSALDQKLQVSQTEPAKSDLSKLESVRMKVPKEKGLSSHVEVVEKEGRLKARKHLKPEQPADGVSAVDLEKLEARKRRFADSNLKAEKQKPEVKKSSPEMEDARVLSKKQPDVSSREVILLREGEAERKPVRKEILKRESKKIKLDRLNTVASPKDCQELASISVGSGSRPSSDLQARLGELAGESVENQEVQSKKPIPSKPQLKQLQVLDDQGPEREDVRKNYCSLRDETPERKSGQEKSHSVNTEEKIGIDIDHTQSYRKQMEQSRRKQQMEMEIAKSEKFGSPKKDVDEYERRSLVHEVGKPPQDVTDDSPPSKKKRMDHVDFDICTKRERNYRSSRQISEDSERTGGSPSVRHGSFHEDEDPIGSPRLLSVKGSPKVDEKVLPYSNITVREESLKFNPYDSSRREQMADMAKIKLSVLNSEDELNRWDSQMKQDAGRFDVSFPNSIIKRDSLRKRSVRDLEPGEVPSDSDEDGEHKSHSPRASALYESSRLSFLLRDREDKLRERDERLSSSLERNKFYSFALDKTITPDTKALLERAKSLSSSREENWSFLDWDSRFANFRNNKDKEKVDSAPRPIPSWYMKKKKIRTDSEGKMDDKKEDHKEEEQERQELFASRFLHSSIFEQDSKRLQHLERKEEDSDFISGRIYGKQTSEGANSTTDSIQEPVVLFHSRFMELTRMQQKEKEKDQKPKEVEKQEDTENHPKTPESAPENKDSELKTPPSVGPPSVTVVTLESAPSALEKTTGDKTVEAPLVTEEKTVEPATVSEEAKPASEPAPAPVEQLEQVDLPPGADPDKEAAMMPAGVEEGSSGDQPPYLDAKPPTPGASFSQAESNVDPEPDSTQPLSKPAQKSEEANEPKAEKPDATADAEPDANQKAEAAPESQPPASEDLEVDPPVAAKDKKPNKSKRSKTPVQAAAVSIVEKPVTRKSERIDREKLKRSNSPRGEAQKLLELKMEAEKITRTASKNSAADLEHPEPSLPLSRTRRRNVRSVYATMGDHENRSPVKEPVEQPRVTRKRLERELQEAAAVPTTPRRGRPPKTRRRADEEEENEAKEPAETLKPPEGWRSPRSQKTAAGGGPQGKKGKNEPKVDATRPEATTEVGPQIGVKESSMEPKAAEEEAGSEQKRDRKDAGTDKNPPETAPVEVVEKKPAPEKNSKSKRGRSRNSRLAVDKSASLKNVDAAVSPRGAAAQAGERESGVVAVSPEKSESPQKEDGLSSQLKSDPVDPDKEPEKEDVSASGPSPEATQLAKQMELEQAVEHIAKLAEASASAAYKADAPEGLAPEDRDKPAHQASETELAAAIGSIINDISGEPENFPAPPPYPGESQTDLQPPAGAQALQPSEEGMETDEAVSGILETEAATESSRPPVNAPDPSAGPTDTKEARGNSSETSHSVPEAKGSKEVEVTLVRKDKGRQKTTRSRRKRNTNKKVVAPVESHVPESNQAQGESPAANEGTTVQHPEAPQEEKQSEKPHSTPPQSCTSDLSKIPSTENSSQEISVEERTPTKASVPPDLPPPPQPAPVDEEPQARFRVHSIIESDPVTPPSDPSIPIPTLPSVTAAKLSPPVASGGIPHQSPPTKVTEWITRQEEPRAQSTPSPALPPDTKASDVDTSSSTLRKILMDPKYVSATSVTSTSVTTAIAEPVSAAPCLHEAPPPPVDSKKPLEEKTAPPVTNNSEIQASEVLVAADKEKVAPVIAPKITSVISRMPVSIDLENSQKITLAKPAPQTLTGLVSALTGLVNVSLVPVNALKGPVKGSVTTLKSLVSTPAGPVNVLKGPVNVLTGPVNVLTTPVNATVGTVNAAPGTVNAAASAVNATASAVTVTAGAVTAASGGVTATTGTVTMAGAVIAPSTKCKQRASANENSRFHPGSMPVIDDRPADAGSGAGLRVNTSEGVVLLSYSGQKTEGPQRISAKISQIPPASAMDIEFQQSVSKSQVKPDSVTASQPPSKGPQAPAGYANVATHSTLVLTAQTYNASPVISSVKADRPSLEKPEPIHLSVSTPVTQGGTVKVLTQGINTPPVLVHNQLVLTPSIVTTNKKLADPVTLKIETKVLQPANLGSTLTPHHPPALPSKLPTEVNHVPSGPSIPADRTVSHLAAAKLDAHSPRPSGPGPSSFPRASHPSSTASTALSTNATVMLAAGIPVPQFISSIHPEQSVIMPPHSITQTVSLSHLSQGEVRMNTPTLPSITYSIRPEALHSPRAPLQPQQIEVRAPQRASTPQPAPAGVPALASQHPPEEEVHYHLPVARATAPVQSEVLVMQSEYRLHPYTVPRDVRIMVHPHVTAVSEQPRAADGVVKVPPASKAPQQPGKEAAKTPDAKAAPTPTPAPVPVPVPLPAPAPAPHGEARILTVTPSNQLQGLPLTPPVVVTHGVQIVHSSGELFQEYRYGDIRTYHPPAQLTHTQFPAASSVGLPSRTKTAAQGPPPEGEPLQPPQPVQSTQPAQPAPPCPPSQLGQPGQPPSSKMPQVSQEAKGTQTGVEQPRLPAGPANRPPEPHTQVQRAQAETGPTSFPSPVSVSMKPDLPVSLPTQTAPKQPLFVPTTSGPSTPPGLVLPHTEFQPAPKQDSSPHLTSQRPVDMVQLLKKYPIVWQGLLALKNDTAAVQLHFVSGNNVLAHRSLPLSEGGPPLRIAQRMRLEATQLEGVARRMTVETDYCLLLALPCGRDQEDVVSQTESLKAAFITYLQAKQAAGIINVPNPGSNQPAYVLQIFPPCEFSESHLSRLAPDLLASISNISPHLMIVIASV

SEQ ID NO: 2288 - protein, 154 aa, Homo sapiens [sequence omitted]

SEQ ID NO: 2289 - protein, 121 aa, Homo sapiens
MFGACYKQPLKPSGSEPPAEECRMTPRHAGCDVTEMQRILSQPTFTEHLLRAVCLVNGKGSLSRPQESILGSLARKNLRRIHRVSLVMCVRPLSPSKAIISPVTCMYTSRWPEASEESQKK

SEQ ID NO: 2290 - protein, 1204 aa, Homo sapiens
MVGVLAMAAAAAPPPVKDCEIEPCKKRKKDDDTSTCKTITKYLSPLGKTRDRVFAPPKPSNILDYFRKTSPTNEKTQLGKECKIKSPESVPVDSNKDCTTPLEMFSNVEFKKKRKRVNLSHQLNNIKTENEAPIEISSDDSKEDYSLNNDFVESSTSVLRYKKQVEVLAENIQDTKSQPNTMTSLQNSKKVNPKQGTTKNDFKKLRKRKCRDVVDLSESLPLAEELNLLKKDGKDTKQMENTTSHANSRDNVTEAAQLNDSIITVSYEEFLKSHKENKVEEIPDSTMSICVPSETVDEIVKSGYISESENSEISQQVRFKTVTVLAQVHPIPPKKTGKIPRIFLKQKQFEMENSLSDPENEQTVQKRKSNVVIQEEELELAVLEAGSSEAVKPKCTLEERQQFMKAFRQPASDALKNGVKKSSDKQKDLNEKCLYEVGRDDNSKKIMENSGIQMVSKNGNLQLHTDKGSFLKEKNKKLKKKNKKTLDTGAIPGKNREGNTQKKETTFFLKEKQYQNRMSLRQRKTEFFKSSTLFNNESLVYEDIANDDLLKVSSLCNNNKLSRKTSIPVKDIKLTQSKAESEASLLNVSTPKSTRRSGRISSTPTTETIRGIDSDDVQDNSQLKASTQKAANLSEKHSLYTAELITVPFDSESPIRMKFTRISTPKKSKKKSNKRSEKSEATDGGFTSQIRKASNTSKNISKAKQLIEKAKALHISRSKVTEEIAIPLRRSSRHQTLPERKKLSETEDSVIIIDSSPTALKHPEKNQKKLQCLNDVLGKKLNTSTKNVPGKMKVAPLFLVRKAQKAADPVPSFDESSQDTSEKSQDCDVQCKAKRDFLMSGLPDLLKRQIAKKAAALDVYNAVSTSFQRVVHVQQKDDGCCLWHLKPPSCPLLTKFKELNTKVIDLSKCGIALGEFSTLNSKLKSGNSAAVFMRTRKEFTEEVRNLLLEEIRWSNPEFSLKKYFPLLLKKQIEHQVLSSECHSKQELEADVSHKETKRKLVEAENSKSKRKKPNEYSKNLEKTNRKSEELSKRNNSSGIKLDSSKDSGTEDMLWTEKYQPQTASELIGNELAIKKLHSWLKDWKRRAELEERQNLKGKRDEKHEDFSGGIDFKGSSDDEEESRLCNTVLITGPTGVGKTAAVYACAQELGFKIFEVNASSQRSGRQILSQLKEATQSHQVDKQGVNSQKPCFFNSYYIGKSPSK

SEQ ID NO: 2291 - protein, 6620 aa, Homo sapiens
MDQPQFSGAPRFLTRPKAFVVSVGKDATLSCQIVGNPTPQVSWEKDQQPVTAGARFRLAQDGDLYRLTILDLALGDSGQYVCRARNAIGEAFAAVGLQVDAEAACAEQAPHFLLRPTSIRVREGSEATFRCRVGGSPRPAVSWSKDGRRLGEPDGPRVRVEELGEASALRIRAARPRDGGTYEVRAENPLGAASAAAALVVDSDAADTASRPGTSTAALLAHLQRRREAMRAEGAPASPPSTGTRTCTVTEGKHARLSCYVTGEPKPETVWKKDGQLVTEGRRHVVYEDAQENFVLKILFCKQSDRGLYTCTASNLVGQTYSSVLVVVREPAVPFKKRLQDLEVREKESATFLCEVPQPSTEAAWFKEETRLWASAKYGIEEEGTERRLTVRNVSADDDAVYICETPEGSRTVAELAVQGNLLRKLPRKTAVRVGDTAMFCVELAVPVGPVHWLRNQEEVVAGGRVAISAEGTRHTLTISQCCLEDVGQVAFMAGDCQTSTRFCVSAPRKPPLQPPVDPVVKARMESSVILSWSPPPHGERPVTIDGYLVEKKKLGTYTWIRCHEAEWVATPELTVADVAEEGNFQFRVSALNSFGQSPYLEFPGTVHLAPKLAVRTPLKAVQAVEGGEVTFSVDLTVASAGEWFLDGQALKASSVYEIHCDRTRHTLTIREVPASLHGAQLKFVANGIESSIRMEVRAAPGLTANKPPAAAAREVLARLHEEAQLLAELSDQAAAVTWLKDGRTLSPGPKYEVQASAGRRVLLVRDVARDDAGLYECVSRGGRIAYQLSVQGLARFLHKDMAGSCVDAVAGGPAQFECETSEAHVHVHWYKDGMELGHSGERFLQEDVGTRHRLVAATVTRQDEGTYSCRVGEDSVDFRLRVSEPKVVFAKEQLARRKLQAEAGASATLSCEVAQAQTEVTWYKDGKKLSSSSKVCMEATGCTRRLVVQQAGQADAGEYSCEAGGQRLSFHLDVKEPKVVFAKDQVAHSEVQAEAGANATLSCEVAQAQAEVMWYKDGKKLSSSLKVHVEAKGCRRRLVVQQAGKTDAGDYSCEARGQRVSFRLHITEPKMMFAKEQSVHNEVQAEAGASAMLSCEVAQAQTEVTWYKDGKKLSSSSKVGMEVKGCTRRLVLPQAGKADAGEYSCEAGGQRVSFHLHITEPKGVFAKEQSVHNEVQAEAGTTAMLSCEVAQPQTEVTWYKDGKKLSSSSKVRMEVKGCTRRLVVQQVGKADAGEYSCEAGGQRVSFQLHITEPKAVFAKEQLVHNEVRTEAGASATLSCEVAQAQTEVTWYKDGKKLSSSSKVRIEAAGCMRQLVVQQAGQADAGEYTCEAGGQRLSFHLDVSEPKAVFAKEQLAHRKVQAEAGAIATLSCEVAQAQTEVTWYKDGKKLSSSSKVRMEAVGCTRRLVVQQACQADTGEYSCEAGGQRLSFSLDVAEPKVVFAKEQPVHREVQAQAGASTTLSCEVAQAQTEVMWYKDGKKLSFSSKVRMEAVGCTRRLVVQQAGQADAGEYSCEAGSQRLSFHLHVAEPKAVFAKEQPASREVQAEAGTSATLSCEVAQAQTEVTWYKDGKKLSSSSKVRMEAVGCTRRLVVQEAGQADAGEYSCKAGDQRLSFHLHVAEPKVVFAKEQPAHREVQAEAGASATLSCEVAQAQTEVTWYKDGKKLSSSSKVRVEAVGCTRRLVVQQAGQADAGEYSCEAGGQRLSFRLHVAELEPQISERPCRREPLVVKEHEDIILTATLATPSAATVTWLKDGVEIRRSKRHETASQGDTHTLTVHGAQVLDSAIYSCRVGAEGQDFPVQVEEVAAKFCRLLEPVCGELGGTVTLACELSPACAEVVWRCGNTQPRVGKRFQMVAEGPVRSLTVLGLRAEDAGEYVCESRDDHTSAQLTVSVPRVVKFMSGLSTVVAEEGGEATFQCVVSPSDVAVVWFRDGALLQPSEKFAISQSGASHSLTISDLVLEDAGQITVEAEGASSSAALRVREAPVLFKKKLEPQTVEERSSVTLEVELTRPWPELRWTRNATALAPGKNVEIHAEGARHRLVLHNVGFADRGFFGCETPDDKTQAKLTVEMRQVRLVRGLQAVEAREQGTATMEVQLSHADVDGSWTRDGLRFQQGPTCHLAVRGPMHTLTLSGLRPEDSGLMVFKAEGVHTSARLVVTELPVSFSRPLQDVVTTEKEKVTLECELSRPNVDVRWLKDGVELRAGKTMAIAAQGACRSLTIYRCEFADQGVYVCDAHDAQSSASVKVQGRTYTLIYRRVLAEDAGEIQFVAENAESRAQLRVKELPVTLVRPLRDKIAMEKHRGVLECQVSRASAQVRWFKGSQELQPGPKYELVSDGLYRKLIISDVHAEDEDTYTCDAGDVKTSAQFFVEEQSITIVRGLQDVTVMEPAPAWFECETSIPSVRPPKWLLGKTVLQAGGNVGLEQEGTVHRLMLRRTCSTMTGPVHFTVGKSRSSARLVVSDIPVVLTRPLEPKTGRELQSVVLSCDFRPAPKAVQWYKDDTPLSPSEKFKMSLEGQMAELRILRLMPADAGVYRCQAGSAHSSTEVTVEAREVTVTGPLQDAEATEEGWASFSCELSHEDEEVEWSLNGMPLYNDSFHEISHKGRRHTLVLKSIQRADAGIVRASSLKVSTSARLEVRVKPVVFLKALDDLSAEERGTLALQCEVSDPEAHVVWRKDGVQLGPSDKYDFLHTAGTRGLVVHDVSPEDAGLYTCHVGSEETRARVRVHDLHVGITKRLKTMEVLEGESCSFECVLSHESASDPAMWTVGGKTVGSSSRFQATRQGRKYILVVREAAPSDAGEVVFSVRGLTSKASLIVRERPAAIIKPLEDQWVAPGEDVELRCELSRAGTPVHWLKDRKAIRKSQKYDVVCEGTMAMLVIRGASLKDAGEYTCEVEASKSTASLHVEEKANCFTEELTNLQVEEKGTAVFTCKTEHPAATVTWRKGLLELRASGKHQPSQEGLTLRLTISALEKADSDTYTCDIGQAQSRAQLLVQGRRVHIIEDLEDVDVQEGSSATFRCRISPANYEPVHWFLDKTPLHANELNEIDAQPGGYHVLTLRQLALKDSGTIYFEAGDQRASAALRVTEKPSVFSRELTDATITEGEDLTLVCETSTCDIPMCWTKDGKTLRGSARCQLSHEGHRAQLLITGATLQDSGRYKCEAGGACSSSIVRVHARPVRFQEALKDLEVLEGGAATLRCVLSSVAAPVKWCYGNNVLRPGDKYSLRQEGAMLELVVRNLRPQDSGRYSCSFGDQTTSATLTVTALPAQFIGKLRNKEATEGATATLRCELSKTAPVEWRKGSETLRDGDRYCLRQDGAMCELQIRGLAMVDAAEYSCVCGEERTSASLTIRPMPAHFIGRLRHQESIEGATATLRCELSKAAPVEWRKGRESLRDGDRHSLRQDGAVCELQICGLAVADAGEYSCVCGEERTSATLTVKALPAKFTEGLRNEEAVEGATAMLWCELSKVAPVEWRKGPENLRDGDRYILRQEGTRCELQICGLAMADAGEYLCVCGQERTSATLTIRALPARFIEDVKNQEAREGATAVLQCELNSAAPVEWRKGSETLRDGDRYSLRQDGTKCELQIRGLAMADTGEYSCVCGQERTSAMLTVRALPIKFTEGLRNEEATEGATAVLRCELSKMAPVEWWKGHETLRDGDRHSLRQDGARCELQIRGLVAEDAGEYLCMCGKERTSAMLTVRAMPSKFIEGLRNEEATEGDTATLWCELSKAAPVEWRKGHETLRDGDRHSLRQDGSRCELQIRGLAVVDAGEYSCVCGQERTSATLTVRALPARFIEDVKNQEAREGATAVLQCELSKAAPVEWRKGSETLRGGDRYSLRQDGTRCELQIHGLSVADTGEYSCVCGQERTSATLTVRAPQPVFREPLQSLQAEEGSTATLQCELSEPTATVVWSKGGLQLQANGRREPRLQGCTAELVLQDLQREDTGEYTCTCGSQATSATLTVTAAPVRFLRELQHQEVDEGGTAHLCCELSRAGASVEWRKGSLQLFPCAKYQMVQDGAAAELLVRGVEQEDAGDYTCDTGHTQSMASLSVRVPRPKFKTRLQSLEQETGDIARLCCQLSDAESGAVVQWLKEGVELHAGPKYEMRSQGATRELLIHQLEAKDTGEYACVTGGQKTAASLRVTEPEVTIVRGLVDAEVTADEDVEFSCEVSRAGATGVQWCLQGLPLQSNEVTEVAVRDGRIHTLRLKGVTPEDAGTVSFHLGNHASSAQLTVRAPEVTILEPLQDVQLSEGQDASFQCRLSRASGQEARWALGGVPLQANEMNDITVEQGTLHLLTLHKVTLEDAGTVSFHVGTCSSEAQLKVTAKNTVVRGLENVEALEGGEALFECQLSQPEVAAHTWLLDDEPVRTSENAEVVFFENGLRHLLLLKNLRPQDSCRVTFLAGDMVTSAFLTVRGWRLEILEPLKNAAVRAGAQARFTCTLSEAVPVGEASWYINGAAVQPDDSDWTVTADGSHQALLLRSAQPHHAGEVTFACRDAVASARLTVLGLPDPPEDAEVVAHSSHTVTLSWAAPMSDGGGGLCGYRVEVKEGATGQWRLCHELVPGPECVVDGLAPGETYRFRVAAVGPVGAGEPVHLPQTVRLAEPPKPVPPQPSAPESRQVAAGEDVSLELEVVAEAGEVIWHKGMERIQPGGRFEVVSQGRQQMLVIKGFTAEDQGEYHCGLAQGSICPAAATFQVALSPASVDEAPQPSLPPEAAQEGDLHLLWEALARKRRMSREPTLDSISELPEEDGRSQRLPQEAEEVAPDLSEGYSTADELARTGDADLSHTSSDDESRAGTPSLVTYLKKAGRPGTSPLASKVGAPAAPSVKPQQQQEPLAAVRPPLGDLSTKDLGDPSMDKAAVKIQAAFKGYKVRKEMKQQEGPMFSHTFGDTEAQVGDALRLECVVASKADVRARWLKDGVELTDGRHHHIDQLGDGTCSLLIAGLDRADAGCYTCQVSNKFGQVTHSACVVVSGSESEAESSSGGELDDAFRRAARRLHRLFRTKSPAEVSDEELFLSADEGPAEPEEPADWQTYREDEHFICIRFEALTEARQAVTRFQEMFATLGIGVEIKLVEQGPRRVEMCISKETPAPVVPPEPLPSLLTSDAAPVFLTELQNQEVQDGYPVSFDCVVTGQPMPSVRWFKDGKLLEEDDHYMINEDQQGGHQLIITAVVPADMGVYRCLAENSMGVSSTKAELRVDLTSTDYDTAADATESSSYFSAQGYLSSREQEGTESTTDEGQLPQVVEELRDLQVAPGTRLAKFQLKVKGYPAPRLYWFKDGQPLTASAHIRMTDKKILHTLEIISVTREDSGQYAAYISNAMGAAYSSARLLVRGPDEPEEKPASDVHEQLVPPRMLERFTPKKVKKGSSITFSVKVEGRPVPTVHWLREEAERGVLWIGPDTPGYTVASSAQQHSLVLLDVGRQHQGTYTCIASNAAGQALCSASLHVSGLPKVEEQEKVKEALISTFLQGTTQAISAQGFQTASFADLGGQRKEEPLAAKEALGHLSLAEVGTEEFLQKLTSQITEMVSAKITQAKLQVPGGDSDEDSKTPSASPRHGRSRPSSSIQESSSESEDGDARGEIFDIYVVTADYLPLGAEQDAITLREGQYVEVLDAAHPLRWLVRTKPTKSSPSRQGWVSPAYLDRRLKLSPEWGAAEAPEFPGEAVSEDEYKARLSSVIQELLSSEQAFVEELQFLQSHHLQHLERCPHVPIAVAGQKAVIFRNVRDIGRFHSSFLQELQQCDTDDDVAMCFIKNQAAFEQYLEFLVGRVQAESVVVSTAIQEFYKKYAEEALLAGDPSQPPPPPLQHYLEQPVERVQRYQALLKELIRNKARNRQNCALLEQAYAVVSALPQRAENKLHVSLMENYPGTLQALGEPIRQGHFIVWEGAPGARMPWKGHNRHVFLFRNHLVICKPRRDSRTDTVSYVFRNMMKLSSIDLNDQVEGDDRAFEVWQEREDSVRKYLLQARTAIIKSSWVKEICGIQQRLALPVWRPPDFEEELADCTAELGETVKLACRVTGTPKPVISWYKDGKAVQVDPHHILIEDPDGSCALILDSLTGVDSGQYMCFAASAAGNCSTLGKILVQVPPRFVNKVLASPFVEGEDAQFTCTIEGAPYPQIRWYKDGALLTTGNKFQTLSEPRSGLLVLVIRAASKEDLGLYECELVNRLGSARASAELRIQSPMLQAQEQCHREQLVAAVEVTEQETKVPKKTVIIEETITTVVKSPRGQRRSPSKSPSRSPSRCSASPLRPGLLAPDLLYLPGAGQPRRPEAEPGQKPVVPTLYVTEAEAHSPALPGLSGPQPKWVEVEETIEVRVKKMGPQGVSPTTEVPRSSSGHLFTLPGATPGGDPNSNNSNNKLLAQEAWAQGTAMVGVREPLVFRVDARGSVDWAASGMGSLEEEGTMEEAGEEEGEDGDAFVTEESQDTHSLGDRDPKILTHNGRMLTLADLEDYVPGEGETFHCGGPGPGAPDDPPCEVSVIQREIGEPTVGQPVLLSVGHALGPRGPLGLFRPEPRGASPPGPQVRSLEGTSFLLREAPARPVGSAPWTQSFCTRIRRSADSGQSSFTTELSTQTVNFGTVGETVTLHICPDRDGDEAAQE

SEQ ID NO: 2292 - protein, 103 aa, Homo sapiens
MERQQQQQQQLRNLRDFLLVYNRMTELCFQRCVPSLHHRALDAEEEACLHSCAGKLIHSNHRLMAAYVQLMPALVQRRIADYEAASAVPSVAAEQPGVSPSGS

SEQ ID NO: 2293 - protein, 447 aa, Homo sapiens
LSDARWAELLPLLQQCQVVRLDDCGLTEARCKDISSALRVNPALAELNLRSNELGDVGVHCVLQGLQTPSCKIQKLSLQNCCLTGAGCGVLSSTLRTLPTLQELHLSDNLLGDAGLQLLCEGLLDPQCRLEKLQLEYCSLSAASCEPLASVLRAKPDFKELTVSNNDINEAGVRVLCQGLKDSPCQLEALKLESCGVTSDNCRDLCGIVASKASLRELALGSNKLGDVGMAELCPGLLHPSSRLRTLWIWECGITAKGCGDLCRVLRAKESLKELSLAGNELGDEGARLLCETLLEPGCQLESLWVKSCSFTAACCSHFSSVLAQNRFLLELQISNNRLEDAGVRELCQGLGQPGSVLRVLWLADCDVSDSSCSSLAATLLANHSLRELDLSNNCLGDAGILQLVESVRQPGCLLEQLVLYDIYWSEEMEDRLQALEKDKPSLRVIS

SEQ ID NO: 2294 - protein, 553 aa, Homo sapiens [sequence omitted]

SEQ ID NO: 2295 - protein, 1004 aa, Homo sapiens
MVQLYNLHPFGSQQVVPCKLEPDRFCGGGRDALFVAAGCKVEAFAVAGQELCQPRCAFSTLGRVLRLAYSEAGDYLVAIEEKNKATFLRAYVNWRNKRTENSRVCIRMIGHNVEGPFSKAFRDQMYIIEMPLSEAPLCISCCPVKGDLLVGCTNKLVLFSLKYQIINEEFSLLDFERSLIIHIDNITPVEVSFCVGYVAVMSDLEVLIVKLESGPKNGERVHHHPHKTNNRIRRTEEGISNEISQLESDDFVICQKPLELLGEKSEQSGLSVTLESTGLADEKRKYSHFQHLLYRRFAPDISSYVLSDDIKLHSLQLLPIYQTGSLTSDGKNLSQEKELLSLFCFFSLPHVGYLYMVVKSVELMSVYQYPEKSQQAVLTPQFLHVITSNNLQCFTVRCSAAAAREEDPYMDTTLKACPPVSMDVCALRIQLFIGLKAICHFKNHIILLTKAEPEAIPERRQSPKRLLSRKDTSVKIKIPPVAEAGWNLYIVNTISPVQLYKEMVDYSNTYKTVKTQSCIHLLSEAHLLVRAALMDASQLEPGEKAELLEAFKESCGHLGDCYSRLDSQHSHLTLPYYKMSGLSMAEVLARTDWTVEDGLQKYERGLIFYINHSLYENLDEELNEELAAKVVQMFYVAEPKQVPHILCSPSMKNINPLTAMSYLRKLDTSGFSSILVTLTKAAVALKMGDLDMHRNEMKSHSEMKLVCGFILEPRLLIQQRKGQIVPTELALHLKETQPGLLVASVLGLQKNNKIGIEEADSFFKVLCAKDEDTIPQLLVDFWEAQLVACLPDVVLQELFFKLTSQYIWRLSKRQPPDTTPLRTSEDLINACSHYGLIYPWVHVVISSDSLADKNYTEDLSKLQSLICGPSFDIASIIPFLEPLSEDTIAGLSVHVLCRTRLKEYEQCIDILLERCPEAVIPYANHELKEENRTLWWKKLLPELCQRIKCGGEKYQLYLSSLKETLSIVAVELELKDFMNVLPEDGTATFFLPYLLYCSRKKPLT

SEQ ID NO: 2296 - protein, 428 aa, Homo sapiens [sequence omitted]

SEQ ID NO: 2297 - protein, 485 aa, Homo sapiens [sequence omitted]

SEQ ID NO: 2298 - protein, 861 aa, Homo sapiens [sequence omitted]

SEQ ID NO: 2299 - protein, 386 aa, Homo sapiens
MVCPPGEVPVFWPSPLTSLGAVSSCETPLAFASIPGCTVMTDLKDAKAPPGCLTPERIPEVHHISQDPLHYSIASVSASQKIRELESMIGIDPVLITTGFPTHFNHEPPEETDGPPGAVALVAFLQALEKEVAIIVDQRAWNLHQKIVEDAVEQGVLKTQIPILTYQGGSVEAAQAFLCKNGDPQTPRFDHLVAIERAGRAADGNYYNARKMNIKHLVDPIDDLFLAAKKIPGISSTGVGDGGNELGMGKVKEAVRRHIRHGDVIACDVEADFAVIAGEHSDGHPVRPATQGVSNWGGYALACALYILYSCAVHSQYLRKAVGPSRAPGDQAWTQALPSVIKVTNPSQPLAWKQLLPWMSSRPEVPSRKPRAGTLLPLKSQRQSQP

SEQ ID NO: 2300 - protein, 469 aa, Homo sapiens
MGTVHARSLEPLPSSGPDFGGLGEEAEFVEVEPEAKQEILENKDVVVQHVHFDGLGRTKDDIIICEIGDVFKAKNLIEVMRKSHEAREKLLRLGIFRQVDVLIDTCQGDDALPNGLDVTFEVTELRRLTGSYNTMVGNNEGSMVLGLKLPNLLGRAEKVTFQFSYGTKETSYGLSFFKPRPGNFERNFSVNLYKVTGQFPWSSLRETDRGMSAEYSFPIWKTSHTVKWEGVWRELGCLSRTASFAVRKESGHSLKSSLSHAMVIDSRNSSILPRRGALLKVNQELAGYTGGDVSFIKEDFELQLNKQLIFDSVFSASFWGGMLVPIGDKPSSIADRFYLGGPTSVRGFSMHSIGPQSEGDYLGGEAYWAGGLHLYTPLPFRPGQGGFGELFRTHFFLNAGNLCNLNYGEGPKAHIRKLAECIRWSYGAGIVLRLGNIARLELNYCVPMGVQTGDRICDGVQFGAGIRFL

SEQ ID NO: 2301 - protein, 492 aa, Homo sapiens [sequence omitted]

SEQ ID NO: 2302 - protein, 343 aa, Homo sapiens [sequence omitted]

SEQ ID NO: 2303 - protein, 335 aa, Homo sapiens
MGASSSSALARLGLPARPWPRWLGVAALGLAAVALGTVAWRRAWPRRRRRLQQVGTVAKLWIYPVKSCKGVPVSEAECTAMGLRSGNLRDRFWLVIKEDGHMVTARQEPRLVLISIIYENNCLIFRAPDMDQLVLPSKQPSSNKLHNCRIFGLDIKGRDCGNEAAKWFTNFLKTEAYRLVQFETNMKGRTSRKLLPTLDQNFQVAYPDYCPLLIMTDASLVDLNTRMEKKMKMENFRPNIVVTGCDAFEEDTWDELLIGSVEVKKVMACPRCILTTVDPDTGVIDRKQPLDTLKSYRLCDPSERELYKLSPLFGIYYSVEKIGSLRVGDPVYRMV

SEQ ID NO: 2304 - protein, 418 aa, Homo sapiens
MPSSVSWGILLLAGLCCLVPVSLAEDPQGDAAQKTDTSHHDQDHPTFNKITPNLAEFAFSLYRQLAHQSNSTNIFFSPVSIATAFAMLSLGTKADTHDEILEGLNFNLTEIPEAQIHEGFQELLRTLNQPDSQLQLTTGNGLFLSEGLKLVDKFLEDVKKLYHSEAFTVNFGDTEEAKKQINDYVEKGTQGKIVDLVKELDRDTVFALVNYIFFKGKWERPFEVKDTEEEDFHVDQVTTVKVPMMKRLGMFNIQHCKKLSSWVLLMKYLGNATAIFFLPDEGKLQHLENELTHDIITKFLENEDRRSASLHLPKLSITGTYDLKSVLGQLGITKVFSNGADLSGVTEEAPLKLSKAVHKAVLTIDEKGTEAAGAMFLEAIPMSIPPEVKFNKPFVFLMIDQNTKSPLFMGKVVNPTQK

SEQ ID NO: 2305 - protein, 205 aa, Homo sapiens [sequence omitted]

SEQ ID NO: 2306 - protein, 307 aa, Homo sapiens
MNTRNRVVNSGLGASPASRPTRDPQDPSGRQGELSPVEDQREGLEAAPKGPSRESVVHAGQRRTSAYTLIAPNINRRNEIQRIAEQELANLEKWKEQNRAKPVHLVPRRLGGSQSETEVRQKQQLQLMQSKYKQKLKREESVRIKKEAEEAELQKMKAIQREKSNKLEEKKRLQENLRREAFREHQQYKTAEFLSKLNTESPDRSACQSAVCGPQSSTWARSWAYRDSLKAEENRKLQKMKDEQHQKSELLELKRQQQEQERAKIHQTEHRRVNNAFLDRLQGKSQPGGLEQSGGCWNMNSGNSWGI

SEQ ID NO: 2307 - protein, 2799 aa, Homo sapiens
MTSIHFVVHPLPGTEDQLNDRLREVSEKLNKYNLNSHPPLNVLEQATIKQCVVGPNHAAFLLEDGRVCRIGFSVQPDRLELGKPDNNDGSKLNSNSGAGRTSRPGRTSDSPWFLSGSETLGRLAGNTLGSRWSSGVGGSGGGSSGRSSAGARDSRRQTRVIRTGRDRGSGLLGSQPQPVIPASVIPEELISQAQVVLQGKSRSVIIRELQRTNLDVNLAVNNLLSRDDEDGDDGDDTASESYLPGEDLMSLLDADIHSAHPSVIIDADAMFSEDISYFGYPSFRRSSLSRLGSSRVLLLPLERDSELLRERESVLRLRERRWLDGASFDNERGSTSKEGEPNLDKKNTPVQSPVSLGEDLQWWPDKDGTKFICIGALYSELLAVSSKGELYQWKWSESEPYRNAQNPSLHHPRATFLGLTNEKIVLLSANSIRATVATENNKVATWVDETLSSVASKLEHTAQTYSELQGERIVSLHCCALYTCAQLENSLYWWGVVPFSQRKKMLEKARAKNKKPKSSAGISSMPNITVGTQVCLRNNPLYHAGAVAFSISAGIPKVGVLMESVWNMNDSCRFQLRSPESLKNMEKASKTTEAKPESKQEPVKTEMGPPPSPASTCSDASSIASSASMPYKRRRSTPAPKEEEKVNEEQWSLREVVFVEDVKNVPVGKVLKVDGAYVAVKFPGTSSNTNCQNSSGPDADPSSLLQDCRLLRIDELQVVKTGGTPKVPDCFQRTPKKLCIPEKTEILAVNVDSKGVHAVLKTGNWVRYCIFDLATGKAEQENNFPTSSIAFLGQNERNVAIFTAGQESPIILRDGNGTIYPMAKDCMGGIRDPDWLDLPPISSLGMGVHSLINLPANSTIKKKAAVIIMAVEKQTLMQHILRCDYEACRQYLMNLEQAVVLEQNLQMLQTFISHRCDGNRNILHACVSVCFPTSNKETKEEEEAERSERNTFAERLSAVEAIANAISVVSSNGPGNRAGSSSSRSLRLREMMRRSLRAAGLGRHEAGASSSDHQDPVSPPIAPPSWVPDPPAMDPDGDIDFILAPAVGSLTTAATGTGQGPSTSTIPGPSTEPSVVESKDRKANAHFILKLLCDSVVLQPYLRELLSAKDARGMTPFMSAVSGRAYPAAITILETAQKIAKAEISSSEKEEDVFMGMVCPSGTNPDDSPLYVLCCNDTCSFTWTGAEHINQDIFECRTCGLLESLCCCTECARVCHKGHDCKLKRTSPTAYCDCWEKCKCKTLIAGQKSARLDLLYRLLTATNLVTLPNSRGEHLLLFLVQTVARQTVEHCQYRPPRIREDRNRKTASPEDSDMPDHDLEPPRFAQLALERVLQDWNALKSMIMFGSQENKDPLSASSRIGHLLPEEQVYLNQQSGTIRLDCFTHCLIVKCTADILLLDTLLGTLVKELQNKYTPGRREEAIAVTMRFLRSVARVFVILSVEMASSKKKNNFIPQPIGKCKRVFQALLPYAVEELCNVAESLIVPVRMGIARPTAPFTLASTSIDAMQGSEELFSVEPLPPRPSSDQSSSSSQSQSSYIIRNPQQRRISQSQPVRGRDEEQDDIVSADVEEVEVVEGVAGEEDHHDEQEEHGEENAEAEGQHDEHDEDGSDMELDLLAAAETESDSESNHSNQDNASGRRSVVTAATAGSEAGASSVPAFFSEDDSQSNDSSDSDSSSSQSDDIEQETFMLDEPLERTTNSSHANGAAQAPRSMQWAVRNTQHQRAASTAPSSTSTPAASSAGLIYIDPSNLRRSGTISTSAAAAAAALEASNASSYLTSASSLARAYSIVIRQISDLMGLIPKYNHLVYSQIPAAVKLTYQDAVNLQNYVEEKLIPTWNWMVSIMDSTEAQLRYGSALASAGDPGHPNHPLHASQNSARRERMTAREEASLRTLEGRRRATLLSARQGMMSARGDFLNYALSLMRSHNDEHSDVLPVLDVCSLKHVAYVFQALIYWIKAMNQQTTLDTPQLERKRTRELLELGIDNEDSEHENDDDTNQSATLNDKDDDSLPAETGQNHPFFRRSDSMTFLGCIPPNPFEVPLAEAIPLADQPHLLQPNARKEDLFGRPSQGLYSSSASSGKCLMEVTVDRNCLEVLPTKMSYAANLKNVMNMQNRQKKEGEEQPVLPEETESSKPGPSAHDLAAQLKSSLLAEIGLTESEGPPLTSFRPQCSFMGMVISHDMLLGRWRLSLELFGRVFMEDVGAEPGSILTELGGFEVKESKFRREMEKLRNQQSRDLSLEVDRDRDLLIQQTMRQLNNHFGRRCATTPMAVHRVKVTFKDEPGEGSGVARSFYTAIAQAFLSNEKLPNLECIQNANKGTHTSLMQRLRNRGERDREREREREMRRSSGLRAGSRRDRDRDFRRQLSIDTRPFRPASEGNPSDDPEPLPAHRQALGERLYPRVQAMQPAFASKITGMLLELSPAQLLLLLASEDSLRARVDEAMELIIAHGRENGADSILDLGLVDSSEKVQQENRKRHGSSRSVVDMDLDDTDDGDDNAPLFYQPGKRGFYTPRPGKNTEARLNCFRNIGRILGLCLLQNELCPITLNRHVIKVLLGRKVNWHDFAFFDPVMYESLRQLILASQSSDADAVFSAMDLAFAIDLCKEEGGGQVELIPNGVNIPVTPQNVYEYVRKYAEHRMLVVAEQPLHAMRKGLLDVLPKNSLEDLTAEDFRLLVNGCGEVNVQMLISFTSFNDESGENAEKLLQFKRWFWSIVEKMSMTERQDLVYFWTSSPSLPASEEGFQPMPSITIRPPDDQHLPTANTCISRLYVPLYSSKQILKQKLLLAIKTKNFGFV

SEQ ID NO: 2308 - protein, 660 aa, Homo sapiens
MDVLVSECSARLLQQEEEIKSLTAEIDRLKNCGCLGASPNLEQLQEENLKLKYRLNILRKSLQAERNKPTKNMINIISRLQEVFGHAIKAAYPDLENPPLLVTPSQQAKFGDYQCNSAMGISQMLKTKEQKVNPREIAENITKHLPDNECIEKVEIAGPGFINVHLRKDFVSEQLTSLLVNGVQLPALGENKKVIVDFSSPNIAKEMHVGHLRSTIIGESISRLFEFAGYDVLRLNHVGDWGTQFGMLIAHLQDKFPDYLTVSPPIGDLQVFYKESKKRFDTEEEFKKRAYQCVVLLQGKNPDITKAWKLICDVSRQELNKIYDALDVSLIERGESFYQDRMNDIVKEFEDRGFVQVDDGRKIVFVPGCSIPLTIVKSDGGYTYDTSDLAAIKQRLFEEKADMIIYVVDNGQSVHFQTIFAAAQMIGWYDPKVTRVFHAGFGVVLGEDKKKFKTRSGETVRLMDLLGEGLKRSMDKLKEKERDKVLTAEELNAAQTSVAYGCIKYADLSHNRLNDYIFSFDKMLDDRGNTAAYLLYAFTRIRSIARLANIDEEMLQKAARETKILLDHEKEWKLGRCILRFPEILQKILDDLFLHTLCDYIYELATAFTEFYDSCYCVEKDRQTGKILKVNMWRMLLCEAVAAVMAKGFDILGIKPVQRM

SEQ ID NO: 2309 - protein, 103 aa, Homo sapiens
MMGSKMASASRVVQVVKPHTPLIRFPDRRDNPKPNVSEALRSAGLPSHSSVISQHSKGSKSPDLLMYQGPPDTAEIIKTLPQKYRRKLVSQEEMEFIQRGGPE

SEQ ID NO: 2310 - protein, 411 aa, Homo sapiens
MALQIPPSAPSPLTSCTWAQMTFSTKTSKENEENIQCGENFMDIECFMVLNPSQQLAIAVLSLTLGTFTVLENLLVLCVILHSRSLRCRPSYHFIGSLAVADLLGSVIFVYSFIDFHVFHRKDSRNVFLFKLGGVTASFTASVGSLFLTAIDRYISIHRPLAYKRIVTRPKAVVAFCLMWTIAIVIAVLPLLGWNCEKLQSVCSDIFPHIDETYLMFWIGVTSVLLLFIVYAYMYILWKAHSHAVRMIQRGTQKSIIIHTSEDGKVQVTRPDQARMDIRLAKTLVLILVVLIICWGPLLAIMVYDVFGKMNKLIKTVFAFCSMLCLLNSTVNPIIYALRSKDLRHAFRSMFPSCEGTAQPLDNSMGDSDCLHKHANNAASVHRAAESCIKSTVKIAKVTMSVSTDTSAEAL

SEQ ID NO: 2311 - protein, 368 aa, Homo sapiens [sequence omitted]

SEQ ID NO: 2312 - protein, 2596 aa, Homo sapiens [sequence omitted]

SEQ ID NO: 2313 - protein, 677 aa, Homo sapiens
DMSNIDLVEGDEGRMCINTEWGAFGDDGALEDIRTEFDRELDLGSLNPGKQLFEKMISGLYLGELVRLILLKMAKAGLLFGGEKSSALHTKGKIETRHVAAMEKYKEGLANTREILVDLGLEPSEADCIAVQHVCTIVSFRSANLCAAALAAILTRLRENKKVERLRTTVGMDGTLYKIHPQYPKRLHKVVRKLVPSCDVRFLLSESGSTKGAAMVTAVASRVQAQRKQIDRVLALFQLTREQLVDVQAKMRAELEYGLKKKSHGLATVRMLPTYVCGLPDGTEKGKFLALDLGGTNFRVLLVKIRSGRRSVRMYNKIFAIPLEIMQGTGEELFDHIVQCIADFLDYMGLKGASLPLGFTFSFPCRQMSIDKGTLIGWTKGFKATDCEGEDVVDMLREAIKRRNEFDLDIVAVVNDTVGTMMTCGYEDPNCEIGLIAGTGSNMCYMEDMRNIEMVEGGEGKMCINTEWGGFGDNGCIDDIRTRYDTEVDEGSLNPGKQRYEKMTSGMYLGEIVRQILIDLTKQGLLFRGQISERLRTRGIFETKFLSQIESDRLALLQVRRILQQLGLDSTCEDSIVVKEVCGAVSRRAAQLCGAGLAAIVEKRREDQGLEHLRITVGVDGTLYKLHPHFSRILQETVKELAPRCDVTFMLSEDGSGKGAALITAVAKRLQQAQKEN

SEQ ID NO: 2314 - protein, 558 aa, Homo sapiens
PALASAAWISRPGSQLSDPTTRTLRPRMEAPAQKAGQGGLPKADAQGASGAREKRPEEPRPLEEDRAGSRPTQKGDLRGAAGGRTTPPGGGSRGCSLGVSPGPGTRHSAGTRPLVREPCGPTSSQNPELVIPEGLQAREGPCRSPARGGDCSRNSCLAWHRGAPAGETPPVCDPCPERIQNHPRTQLCEVHTDCWPCQPGTGAPTCPRTPKPTSRGRNPLVEQPRACACGEAFAWRALRIPQERLQATEEPRPCARCGKRFRPNQQQQAGKSPPVCPECGQTSRPRPIVPDPPAQRLYACDECGKAFTRTSSLLQHQRIHTGERPYECAECGKAFVRCSGLYRHQKTHSAERHRRGPVLARRAFRLGCPPCGDYSERSPRRGSGAGEKPYECADCAKAFGLFSHLVEHRRVHTGEKPYACPECGKAFNQRSNLSRHQRTHSSAKPYACPLCEKAFKGRSGLVQHQRAHTGERPYGCSECGKTFRGCSELRQHERLHSGEKPYICRDCGKAFVRNCSLVRHLRTHTGERPYACGDCGRAFSQRSNLNEHRKRHGGRAAP

SEQ ID NO: 2315 - protein, 277 aa, Homo sapiens
MAEDWLDCPALGPGWKRREVFRKSGATCGRSDTYYQSPTGDRIRSKVELTRYLGPACDLTLFDFKQGILCYPAPKAHPVAVASKKRKKPSRPAKTRKRQVGPQSGEVRKEAPRDETKADTDTAPASFPAPGCCENCGISFSGDGTQRQRLKTLCKDCRAQRIAFNREQRMFKSRGCGVCRGCQTQEDCGHCPICLRPPRPGLRRQWKCVQRLMNYSLPAFSNNITGREERKVGVKDPVICFHLKCPISRASWRKPVVPATREAGAGESLEPRSWRPQ

SEQ ID NO: 2316 - protein, 895 aa, Homo sapiens
MRMSVGLSLLLPLWGRTFLLLLSVVMAQSHWPSEPSEAVRDWENQLEASMHSVLSDLHEAVPTVVGIPDGTAVVGRSFRVTIPTDLIASSGDIIKVSAAGKEALPSWLHWDSQSHTLEGLPLDTDKGVHYISVSATRLGANGSHIPQTSSVFSIEVYPEDHSELQSVRTASPDPGEVVSSACAADEPVTVLTVILDADLTKMTPKQRIDLLHRMRSFSEVELHNMKLVPVVNNRLFDMSAFMAGPGNAKKVVENGALLSWKLGCSLNQNSVPDIHGVEAPAREGAMSAQLGYPVVGWHIANKKPPLPKRVRRQIHATPTPVTAIGPPTTAIQEPPSRIVPTPTSPAIAPPTETMAPPVRDPVPGKPTVTIRTRGAIIQTPTLGPIQPTRVSEAGTTVPGQIRPTMTIPGYVEPTAVATPPTTTTKKPRVSTPKPATPSTDSTTTTTRRPTKKPRTPRPVPRVTTKVSITRLETASPPTRIRTTTSGVPRGGEPNQRPELKNHIDRVDAWVGTYFEVKIPSDTFYDHEDTTTDKLKLTLKLREQQLVGEKSWVQFNSNSQLMYGLPDSSHVGKHEYFMHATDKGGLSAVDAFEIHVHRRPQGDRAPARFKAKFVGDPALVLNDIHKKIALVKKLAFAFGDRNCSTITLQNITRGSIVVEWTNNTLPLEPCPKEQIAGLSRRIAEDDGKPRPAFSNALEPDFKATSITVTGSGSCRHLQFIPVVPPRRVPSEAPPTEVPDRDPEKSSEDDVYLHTVIPAVVVAAILLIAGIIAMICYRKKRKGKLTLEDQATFIKKGVPIIFADELDDSKPPPSSSMPLILQEEKAPLPPPEYPNQSVPETTPLNQDTMGEYTPLRDEDPNAPPYQPPPPFTAPMEGKGSRPKNMTPYRSPPPYVPP

SEQ ID NO: 2317 - protein, 2021 aa, Homo sapiens
MSTEDEKLLKEAKKLPWEDRLGHKNWKVRNEANVDLASVFDSITDPKDPRLRDFGHLFRKTVADSNAPVQEKALDALIAFLRAADSDAGRYAKEVCDAIALKCLTGRKNTVDKAQAAFLLWVELEAVDVFLDTMEKAIKNKVAKAVVPAVDVMFQALSEFGSKVIPPKRILKMLPELFDHQDQNVRASAKGVTLELCRWIGKDPVKSILFEKMRDTMKKELEAELANVTAGAKPTRKIRSEQDKEPEAEASSDVVGDGPSEEAVADAPQEIDEYDLMDPVDILTPLEKSGFWDGVKATKWSERKEAVAELTKLASTKKIAPGDFSEICRTLKKLITDVNLAVAVEAIQAIGNLACGLRTHFSASSRFMLPVLLEKLKEKKQSVTDPLTQTLQTMYKAGCLNLVDVIEGKNVKTAVKNKVPLVRSSTLTWLTFCLETSNKALILKAHKEYVPLCMECLNDGTPDVRDAAFSALAAIAKSVGMRPLERSLEKLDDVRKKKLSEMIAGSGGGDQAGTSSVTVQSSVGSTATGCLHNRYTTSKFMQNSDASFVRKSAASMLSGKRPAPSAQASKKVGTGKPGGGKKDGSVRNEGSKSVEPPEDVEPAEMGLEEIENRLGSLVKPETVSQLKSSVWKERLEATLALKEEIEGLQELDKSVEILVRLLCAVPGWNEKNVQLFSFENYFFSNLPDFSINSLGTSERVADIKTRASAMKCLTAFCEAVGPGFVFERLFKIMKEHKNPKVLSEGLLWMVSAVDDFGVSLLKLKDLIDFCKDVGLQSSTAATRNATIKLLGALHKFVGPDIKGFLNDVKPALLSALDTEYEKNPFEGTAAPKRVVKTSVSTSTSSGGLDSLPREDISTKITPNLLKGFESPDWKMRLESIEAVNKILEEANKRIQPTGTGELFGGLRGRLLDSNKNLVMQTLTTIGGVAAAMGPAVEKASKGILSDVLKCLGDNKKHMRECTLAALDLWLGAVHLDKMIPYIIIALTDGKMGAEGRKDLFDWLTKQLTGLSDFVDAIHLLKPASTAMTDKSADVRKAAEGCISEILRVSGQEMIEKNLKDIQGPALALVLEKVRPGFVQEPFESSKAMAGPVSKGVTKISKSTSNGTLKQGNRSRAVPTKGSSQITSVHDIAIQSQALLNTKDSNKEDRERVVVRRIKFEELRPEQIQDLENDMMKFFREDLQKRLLSPDFKKQVDGLEILQKALPSVSKEIIEVLDVLLRWFVLQFCKSNTTCLLKVLEFLPELFNTLRDEEYCMTEAEAAIFLPCLAEKLGHNIEKVREKMRELMKQIIQAYSVGKTYPYILEGLRSKNNRTRIECTDLIGYLLETCGTEIGGLLKYLNIVASLTAERDGELRKAALNTMATGYQILGADIWKYVGKLTDAQKSMIDDRFKWKVSSKYEPFFCFRLAKDMEKRREGKPGEARAALRRSVRDSGCVGAEKESMMGLVSIIYDFLFVSRPEVAEQSGDISQTVPGPLFPRQSYGISEQMLERTPVPRTIAGVNGPTDWNEALDIIMFGSPEQSVEGMKVVCHELAQASNDPEESAIDELVKDADGLVSCLANKVAKTFDVSLMGASSRSCKYVLNTLMQTFQNKKLAHAVKEGTLESLITELLLWLLDERVPRMEDGSQLLKALNVLMLKILDNADRTSSFVVLISLLRPLDPSRWPSPATAEVYAVRNQKFSDLVVKCLIKLTKLLQSTIYEVDLDRLLQSIHVYLQDLGMEEIRRRAGADDKPLRMVKTVLHELVKLRGAAIKGHLSLVPIDMRPQPIILAYIDLNLETLAAARMLTATGPVGQTHWTDSTANNPSPPANSADVQLKQELGAIFKKIGDKQTSTIGLYDLYHITKSYPKVDIFSQLQNASEAFRTYIRDGLAQVEKNAAAGRTPSSLPLSTPPPSSLALPSPDIPSLSSLDVKPLMNPRSDLYTDDIRASNMNPGVMTGTLDAIRERMKNMQLASSEPVSKPLMPTNDNLSMNQQSVPPSQMGQETVHTHPVVLPMDEKALSGLQARMERLKGGSLEHM

SEQ ID NO: 2318 - protein, 2090 aa, Homo sapiens [sequence omitted]

SEQ ID NO: 2319 - protein, 1453 aa, Homo sapiens
MMLPQNSWHIDFGRCCCHQNLFSAVVTCILLLNSCFLISSFNGTDLELRLVNGDGPCSGTVEVKFQGQWGTVCDDGWNTTASTVVCKQLGCPFSFAMFRFGQAVTRHGKIWLDDVSCYGNESALWECQHREWGSHNCYHGEDVGVNCYGEANLGLRLVDGNNSCSGRVEVKFQERWGTICDDGWNLNTAAVVCRQLGCPSSFISSGVVNSPAVLRPIWLDDILCQGNELALWNCRHRGWGNHDCSHNEDVTLTCYDSSDLELRLVGGTNRCMGRVELKIQGRWGTVCHHKWNNAAADVVCKQLGCGTALHFAGLPHLQSGSDVVWLDGVSCSGNESFLWDCRHSGTVNFDCLHQNDVSVICSDGADLELRLADGSNNCSGRVEVRIHEQWWTICDQNWKNEQALVVCKQLGCPFSVFGSRRAKPSNEARDIWINSISCTGNESALWDCTYDGKAKRTCFRRSDAGVICSDKADLDLRLVGAHSPCYGRLEVKYQGEWGTVCHDRWSTRNAAVVCKQLGCGKPMHVFGMTYFKEASGPIWLDDVSCIGNESNIWDCEHSGWGKHNCVHREDVIVTCSGDATWGLRLVGGSNRCSGRLEVYFQGRWGTVCDDGWNSKAAAVVCSQLDCPSSIIGMGLGNASTGYGKIWLDDVSCDGDESDLWSCRNSGWGNNDCSHSEDVGVICSDASDMELRLVGGSSRCAGKVEVNVQGAVGILCANGWGMNIAEVVCRQLECGSAIRVSREPHFTERTLHILMSNSGCTGGEASLWDCIRWEWKQTACHLNMEASLICSAHRQPRLVGADMPCSGRVEVKHADTWRSVCDSDFSLHAANVLCRELNCGDAISLSVGDHFGKGNGLTWAEKFQCEGSETHLALCPIVQHPEDTCIHSREVGVVCSRYTDVRLVNGKSQCDGQVEINVLGHWGSLCDTHWDPEDARVLCRQLSCGTALSTTGGKYIGERSVRVWGHRFHCLGNESLLDNCQMTVLGAPPCIHGNTVSVICTGSLTQPLFPCLANVSDPYLSAVPEGSALICLEDKRLRLVDGDSRCAGRVEIYHDGFWGTICDDGWDLSDAHVVCQKLGCGVAFNATVSAHFGEGSGPIWLDDLNCTGMESHLWQCPSRGWGQHDCRHKEDAGVICSEFTALRLYSETETESCAGRLEVFYNGTWGSVGRRNITTAIAGIVCRQLGCGENGVVSLAPLSKTGSGFMWVDDIQCPKTHISIWQCLSAPWERRISSTAEETWITCEDRIRVRGGDTECSGRVEIWHAGSWGTVCDDSWDLAEAEVVCQQLGCGSALAALRDASFGQGTGTIWLDDMRCKGNESFLWDCHAKPWGQSDCGHKEDAGVRCSGQSLKSLNASSGRLALILSSIFGLLLPVLFILFLTWCRVQKQKHLPLRVSTRRRGSLEENLFHEMETCLKREDPHGTRTSDDTPNHGCEDASDTSLLGVLPASEATK

SEQ ID NO: 2320 - protein, 474 aa, Homo sapiens
MLEPALATGEELPELTLLTTLLEGPGDKTQPPEEETLSQAPESEEEQKKKALERSMYVLSELVETEKMYVDDLGQIVEGYMATMAAQGVPESLRGRDRIVFGNIQQIYEWHRDYFLQELQRCLKDPDWLAQLFIKHERRLHMYVVYCQNKPKSEHVVSEFGDSYFEELRQQLGHRLQLNDLLIKPVQRIMKYQLLLKDFLKYYNRAGMDTADLEQAVEVMCFVPKRCNDMMTLGRLRGFEGKLTAQGKLLGQDTFWVTEPEAGGLLSSRGRERRVFLFEQIIIFSEALGGGVRGGTQPGYVYKNSIKVSCLGLEGNLQGDPCRFALTSRGPEGGIQRYVLQAADPAISQAWIKHVAQILESQRDFLNALQSPIEYQRRESQTNSLGRPRGPGVGSPGRIRLGDQAQGSTHTPINGSLPSLLLSPKGEVARALLPLDKQALGDIPQAPHDSPPVSPTPKTPPCQARLAKLDEDEL

SEQ ID NO: 2321 - protein, 609 aa, Homo sapiens
MSTAPSLSALRSSKHSGGGGGGGGGGGADPAWTSALSGNSSGPGPGSSPAGSTKPFVHAVPPSDPLRQANRLPIKVLKMLTARTGHILHPEYLQPLPSTPVSPIELDAKKSPLALLAQTCSQIGKPDPSPSSKLSSVASNGGGAGGAGGGAAGDKDTKSGPLKLSDIGVEDKSSFKPYSKPGSDKKEPGGGGGGGGGGGGGGGGVSSEKSGFRVPSATCQPFTPRTGSPSSSASAEGGPTGLAHGRISCGGGINVDVNQHPDGGPGGKALGSDCGGSSGSSSGSGPSAPTSSSVLGSGLVAPVSPYKPGQTVFPLPPAGMTYPGSLAGAYAGYPPQFLPHGVALDPTKPGSLVGAQLAAAAAGSLGCSKPAGSSPLAGASPPSVMTASLCRDPYCLSYHCASHLAGAAAASASCAHDPAAAAAALKSGYPLVYPTHPLHGVHSSLTAAAAAGATPPSLAGHPLYPYGFMLPNDPLPHICNWVSANGPCDKRFATSEELLSHLRTHTAFPGTDKLLSGYPSSSSLASAAAAAMACHMHIPTSGAPGSPGTLALRSPHHALGLSSRYHPYSKSPLPTPGAPVPVPAATGPYYSPYALYGQRLTTASALGYQ

SEQ ID NO: 2322 - protein, 756 aa, Homo sapiens
MPSVSKAAAAALSGSPPQTEKPTHYRYLKEFRTEQCPLFSQHKCAQHRPFTCFHWHFLNQRRRRPLRRRDGTFNYSPDVYCSKYNEATGVCPDGDESLLGVLYPLWAPPPVPAPVGAPTVHPFLARWFSHVPWEPAGSADPRASSTPAGGTTWATGLLGDFDACGSQSRECVKGVWWTLLGFRCPYLHRTTGDTERKYHLRYYKTGTCIHETDARGHCVKNGLHCAFAHGPLDLRPPVCDVRELQAQEALQNGQLGGGEGVPDLQPGVLASQAMIEKILSEDPRWQALLPVALLRHRVAHFSDANFVLGSYKTEQCPKPPRLCRQGYACPHYHNSRDRRRNPRRFQYRSTPCPSVKHGDEWGEPSRCDGGDGCQYCHSRTEQQFHPEGPVGSPVSGAFSVFSHAGLVADPSLWYPAEWSWHHVGHSRTINPEGDKPSRLGPAPENIKRGNDFACDGRADAAGMAPHVCVFPIYKSTKCNDMRQTGYCPRGPFCAFAHVEKSLGMVNEWGCHDLHLTSPSSTGSGQPGNAKRRDSPAEGGPRGSEQDSKQGVRAHGVYVFEQNHLAVFAAVHPPAPSVSSSVASSLASSAGSGSSSPTALPAPPARALPLGPASSTVEAVLALEPTPSSPTSSAVQGVAGELGMGSGGQGCWSHVVGALAAVPAWTHSGDLEWDPSTIRTRVNVGGGPAARPAMTLAREPQLLVVGGCPTRNCSGPAASPQQLLDDAGQGGRGERDSSQRPLRPQTTHRQDTRPVPS

SEQ ID NO: 2323 - protein, 515 aa, Homo sapiens
MAFMEKPPAGKVLLDDTVPLTAAIEASQSLQSHTEYIIRVQGGISVENSWQIVRRYSDFDLLNNSLQIAGLSLPLPPKKLIGNMDREFIAERQKGLQNYLNVITTNHILSNCELVKKFLDPNNYSANYTEIALQQVSMFFRSEPKWEVVEPLKDIGWRIRKKYFLMKIKNQPKERLVLSWADLGPDKYLSDKDFQCLIKLLPSCLHPYIYRVTFATANESSALLIRMFNEKGTLKDLIYKAKPKDPFLKKYCNPKKIQGLELQQIKTYGRQILEVLKFLHDKGFPYGHLHASNVMLDGDTCRLLDLENSLLGLPSFYRSYFSQFRKINTLESVDVHCFGHLLYEMTYGRPPDSVPVDSFPPAPSMAVVAVLESTLSCEACKNGMPTISRLLQMPLFSDVLLTTSEKPQFKIPTKLKEALRIAKECIEKRLIEEQKQIHQHRRLTRAQSHHGSEEERKKRKILARKKSKRSALENSEEHSARYSNSNNSAGSGASSPLTSPSSPTPPSTSVEHAPF

SEQ ID NO: 2324 - protein, 215 aa, Homo sapiens
MASRGATRPNGPNTGNKICQFKLVLLGESAVGKSSLVLRFVKGQFHEFQESTIGAAFLTQTVCLDDTTVKFEIWDTAGQERYHSLAPMYYRGAQAAIVVYDITNEESFARAKNWVKELQRQASPNIVIALSGNKADLANKRAVDFQEAQSYADDNSLLFMETSAKTSMNVNEIFMAIAKKLPKNEPQNPGANSARGRGVDLTEPTQPTRNQCCSN

SEQ ID NO: 2325 - protein, 215 aa, Homo sapiens; identical to SEQ ID NO: 2324

SEQ ID NO: 2326 - protein, 3149 aa, Homo sapiens
MGNEVSLEGGAGDGPLPPGGAGPGPGPGPGPGAGKPPSAPAGGGQLPAAGAARSTAVPPVPGPGPGPGPGPGPGSTSRRLDPKEPLGNQRAASPTPKQASATTPGHESPRETRAQGPAGQEADGPRRTLQVDSRTQRSGRSPSVSPDRGSTPTSPYSVPQIAPLPSSTLCPICKTSDLTSTPSQPNFNTCTQCHNKVCNQCGFNPNPHLTQVKEWLCLNCQMQRALGMDMTTAPRSKSQQQLHSPALSPAHSPAKQPLGKPDQERSRGPGGPQPGSRQAETARATSVPGPAQAAAPPEVGRVSPQPPQPTKPSTAEPRPPAGEAPAKSATAVPAGLGATEQTQEGLTGKLFGLGASLLTQASTLMSVQPEADTQGQPAPSKGTPKIVFNDASKEAGPKPLGSGPGPGPAPGAKTEPGARMGPGSGPGALPKTGGTTSPKHGRAEHQAASKAAAKPKTMPKERAICPLCQAELNVGSKSPANYNTCTTCRLQVCNLCGFNPTPHLVEKTEWLCLNCQTKRLLEGSLGEPTPLPPPTSQQPPVGAPHRASGTSPLKQKGPQGLGQPSGPLPAKASPLSTKASPLPSKASPQAKPLRASEPSKTPSSVQEKKTRVPTKAEPMPKPPPETTPTPATPKVKSGVRRAEPATPVVKAVPEAPKGGEAEDLVGKPYSQDASRSPQSLSDTGYSSDGISSSQSEITGVVQQEVEQLDSAGVTGPHPPSPSEIHKVGSSMRPLLQAQGLAPSERSKPLSSGTGEEQKQRPHSLSITPEAFDSDEELEDILEEDEDSAEWRRRREQQDTAESSDDFGSQLRHDYVEDSSEGGLSPLPPQPPARAAELTDEDFMRRQILEMSAEEDNLEEDDTATSGRGLAKHGTQKGGPRPRPEPSQEPAALPKRRLPHNATTGYEELLPEGGSAEATDGSGTLQGGLRRFKTIELNSTGSYGHELDLGQGPDPSLDREPELEMESLTGSPEDRSRGEHSSTLPASTPSYTSGTSPTSLSSLEEDSDSSPSRRQRLEEAKQQRKARHRSHGPLLPTIEDSSEEEELREEEELLREQEKMREVEQQRIRSTARKTRRDKEELRAQRRRERSKTPPSNLSPIEDASPTEELRQAAEMEELHRSSCSEYSPSPSLDSEAEALDGGPSRLYKSGSEYNLPTFMSLYSPTETPSGSSTTPSSGRPLKSAEEAYEEMMRKAELLQRQQGQAAGARGPHGGPSQPTGPRGLGSFEYQDTTDREYGQAAQPAAEGTPASLGAAVYEEILQTSQSIVRMRQASSRDLAFAEDKKKEKQFLNAESAYMDPMKQNGGPLTPGTSPTQLAAPVSFSTPTSSDSSGGRVIPDVRVTQHFAKETQDPLKLHSSPASPSSASKEIGMPFSQGPGTPATTAVAPCPAGLPRGYMTPASPAGSERSPSPSSTAHSYGHSPTTANYGSQTEDLPQAPSGLAAAGRAAREKPLSASDGEGGTPQPSRAYSYFASSSPPLSPSSPSESPTFSPGKMGPRATAEFSTQTPSPAPASDMPRSPGAPTPSPMVAQGTQTPHRPSTPRLVWQESSQEAPFMVITLASDASSQTRMVHASASTSPLCSPTETQPTTHGYSQTTPPSVSQLPPEPPGPPGFPRVPSAGADGPLALYGWGALPAENISLCRISSVPGTSRVEPGPRTPGTAVVDLRTAVKPTPIILTDQGMDLTSLAVEARKYGLALDPIPGRQSTAVQPLVINLNAQEHTFLATATTVSITMASSVFMAQQKQPVVYGDPYQSRLDFGQGGGSPVCLAQVKQVEQAVQTAPYRSGPRGRPREAKFARYNLPNQVAPLARRDVLITQMGTAQSIGLKPGPVPEPGAEPHRATPAELRSHALPGARKPHTVVVQMGEGTAGTVTTLLPEEPAGALDLTGMRPESQLACCDMVYKLPFGSSCTGTFHPAPSVPEKSMADAAPPGQSSSPFYGPRDPEPPEPPTYRAQGVVGPGPHEEQRPYPQGLPGRLYSSMSDTNLAEAGLNYHAQRIGQLFQGPGRDSAMDLSSLKHSYSLGFADGRYLGQGLQYGSVTDLRHPTDLLAHPLPMRRYSSVSNIYSDHRYGPRGDAVGFQEASLAQYSATTAREISRMCAALNSMDQYGGRHGSGGGGPDLVQYQPQHGPGLSAPQSLVPLRPGLLGNPTFPEGHPSPGNLAQYGPAAGQGTAVRQLLPSTATVRAADGMIYSTINTPIAATLPITTQPASVLRPMVRGGMYRPYASGGITAVPLTSLTRVPMIAPRVPLGPTGLYRYPAPSRFPIASSVPPAEGPVYLGKPAAAKAPGAGGPSRPEMPVGAAREEPLPTTTPAAIKEAAGAPAPAPLAGQKPPADAAPGGGSGALSRPGFEKEEASQEERQRKQQEQLLQLERERVELEKLRQLRLQEELERERVELQRHREEEQLLVQRELQELQTIKHHVLQQQQEERQAQFALQREQLAQQRLQLEQIQQLQQQLQQQLEEQKQRQKAPFPAACEAPGRGPPLAAAELAQNGQYWPPLTHAAFIAMAGPEGLGQPREPVLHRGLPSSASDMSLQTEEQWEASRSGIKKRHSMPRLRDACELESGTEPCVVRRIADSSVQTDDEDGESRYLLSRRRRARRSADCSVQTDDEDSAEWEQPVRRRRSRLPRHSDSGSDSKHDATASSSSAAATVRAMSSVGIQTISDCSVQTEPDQLPRVSPAIHITAATDPKVEIVRYISAPEKTGRGESLACQTEPDGQAQGVAGPQLVGPTAISPYLPGIQIVTPGPLGRFEKKKPDPLEIGYQAHLPPESLSQLVSRQPPKSPQVLYSPVSPLSPHRLLDTSFASSERLNKAHVSPQKHFTADSALRQQTLPRPMKTLQRSLSDPKPLSPTAEESAKERFSLYQHQGGLGSQVSALPPNSLVRKVKRTLPSPPPEEAHLPLAGQASPQLYAASLLQRGLTGPTTVPATKASLLRELDRDLRLVEHESTKLRKKQAELDEEEKEIDAKLKYLELGITQRKESLAKTGVAVTTHPCVVLASIVTTYRTVSSTSCGSRAAPLPLASLWTSLPLPLLLPPPLVPLPSSSPASSLQPHSILQAVVGQLRTDSQPTRPPPTLAPARTQLLPFLLVPVTQLSLACQTSRLSAPQATMQAKHPCQPHRAPFFQSPLIAVPHCRSHARHR

SEQ ID NO: 2327 - protein, 358 aa, Homo sapiens
MPEDVREKKENLLLNSERSTRLLTKTSHSQGGDQALSKSTGSPTEKLIEKRQGAKTVFNKFSNMNWPVDIHPLNKSLVKDNKWKKTEETQEKRRSFLQEFCKKYGGVSHHQSHLFHTVSRIYVEDKHKILYCEVPKAGCSNWKRILMVLNGLASSAYNISHNAVHYGKHLKKLDSFDLKGIYTRLNTYTKAVFVRDPMERLVSAFRDKFEHPNSYYHPVFGKAIIKKYRPNACEEALINGSGVKFKEFIHYLLDSHRPVGMDIHWEKVSKLCYPCLINYDFVGKFETLEEDANYFLQMIGAPKELKFPNFKDRHSSDERTNAQVVRQYLKDLTRTERQLIYDFYYLDYLMFNYTTPFL

SEQ ID NO: 2328 - protein, 457 aa, Homo sapiens
MTSMASLFSFTSPAVKRLLGWKQGDEEEKWAEKAVDALVKKLKKKKGAMEELEKALSSPGQPSKCVTIPRSLDGRLQVSHRKGLPHVIYCRVWRWPDLQSHHELKPLDICEFPFGSKQKEVCINPYHYKRVESPVLPPVLVPRHNEFNPQHSLLVQFRNLSHNEPHMPQNATFPDSFHQPNNTPFPLSPNSPYPPSPASSTYPNSPASSGPGSPFQLPADTPPPAYMPPDDQMGQDNSQPMDTSNNMIPQIMPSISSRDVQPVAYEEPKHWCSIVYYELNNRVGEAFHASSTSVLVDGFTDPSNNKSRFCLGLLSNVNRNSTIENTRRHIGKGVHLYYVGGEVYAECLSDSSIFVQSRNCNFHHGFHPTTVCKIPSSCSLKIFNNQEFAQLLAQSVNHGFEAVYELTKMCTIRMSFVKGWGAEYHRQDVTSTPCWIEIIFMGLFSGWIKSLLRWAPL

SEQ ID NO: 2329 - protein, 155 aa, Homo sapiens
MDFDIAGPSIRGALVLGYEGWLAGYQMNFETAKSRVTQSNFAVGYKTDEFQLHTNVNDGTEFGGSIYQKVNKKLETAVNLAWTAGNSNTRFGIAAKYQIDPDACFSAKVNNSSLIGLGYTQTLKPGIKLTLSALLDGKNVNAGGHKLGLGLEFQA

SEQ ID NO: 2330 - protein, 725 aa, Homo sapiens
MEVGFQKGTRQLLGSRTQLELVLAGASLLLAALLLGCLVALGVQYHRDPSHSTCLTEACIRVAGKILESLDRGVSPCEDFYQFSCGGWIRRNPLPDGRSRWNTFNSLWDQNQAILKHLLENTTFNSSSEAEQKTQRFYLSCLQVERIEELGAQPLRDLIEKIGGWNITGPWDQDNFMEVLKAVAGTYRATPFFTVYISADSKSSNSNVIQVDQSGLFLPSRDYYLNRTANEKVLTAYLDYMEELGMLLGGRPTSTREQMQQVLELEIQLANITVPQDQRRDEEKIYHKMSISELQALAPSMDWLEFLSFLLSPLELSDSEPVVVYGMDYLQQVSELINRTEPSILNNYLIWNLVQKTTSSLDRRFESAQEKLLETLYGTKKSCVPRWQTCISNTDDALGFALGSLFVKATFDRQSKEIAEGMISEIRTAFEEALGQLVWMDEKTRQAAKEKADAIYDMIGFPDFILEPKELDDVYDGYEISEDSFFQNMLNLYNFSAKVMADQLRKPPSRDQWSMTPQTVNAYYLPTKNEIVFPAGILQAPFYARNHPKALNFGGIGVVMGHELTHAFDDQGREYDKEGNLRPWWQNESLAAFRNHTACMEEQYNQYQVNGERLNGRQTLGENIADNGGLKAAYNAYKAWLRKHGEEQQLPAVGLTNHQLFFVGFAQVWCSVRTPESSHEGLVTDPHSPARFRVLGTLSNSRDFLRHFGCPVGSPMNPGQLCEVW

SEQ ID NO: 2331 - protein, 177 aa, Homo sapiens
MSGALDVLQMKEEDVLKFLAAGTHLGGTNLDFQMEQYIYKRKSDGIYIINLKRTWEKLLLAARAIVAIENPADVSVISSRNTGQVCGTVRAVLKFAAATGATPIAGRFTPGTFTNQIQAAFREPRLLVVTDPGLTTSLSRRHLMLTYLPLRCVTQILLCAMWTLPSHATTRELTQWV

SEQ ID NO: 2332 - protein, 742 aa, Homo sapiens
MEEGFRDRAAFIRGAKDIAKEVKKHAAKKVVKGLDRVQDEYSRRSYSRFEEEDDDDDFPAPSDGYYRGEGTHDEEEGGASSDATEGHDEDDEIYEGEYQGIPRAESGGKGERMADGAPLAGVRGGLSDGEGPPGGRGEAQRRKEREELAQQYEAILRECGHGRFQWTLYFVLGLALMADGVEVFVVGFVLPSAEKDMCLSDSNKGMLGLIVYLGMMVGAFLWGGLADRLGRRQCLLISLSVNSVFAFFSSFVQGYGTFLFCRLLSGVGIGGSIPIVFSYFSEFLAQEKRGEHLSWLCMFWMIGGVYAAAMAWAIIPHYGWSFQMGSAYQFHSWRVFVLVCAFPSVFAIGALTTQPESPRFFLENGKHDEAWMVLKQVHDTNMRAKGHPERVFSVTHIKTIHQEDELIEIQSDTGTWYQRWGVRALSLGGQVWGNFLSCFGPEYRRITLMMMGVWFTMSFSYYGLTVWFPDMIRHLQAVDYASRTKVFPGERVEHVTFNFTLENQIHRGGQYFNDKFIGLRLKSVSFEDSLFEECYFEDVTSSNTFFRNCTFINTVFYNTDLFEYKFVNSRLINSTFLHNKEGCPLDVTGTGEGAYMVYFVSFLGTLAVLPGNIVSALLMDKIGRLRMLAGSSVMSCVSCFFLSFGNSESAMIALLCLFGGVSIASWNALDVLTVELYPSDKRTTAFGFLNALCKLAAVLGISIFTSFVGITKAAPILFASAALALGSSLALKLPETRGQVLQ

SEQ ID NO: 2333 - protein, 960 aa, Homo sapiens
MWRLRRAAVACEVCQSLVKHSSGIKGSLPLQKLHLVSRSIYHSHHPTLKLQRPQLRTSFQQFSSLTNLPLRKLKFSPIKYGYQPRRNFWPARLATRLLKLRYLILGSAVGGGYTAKKTFDQWKDMIPDLSEYKWIVPDIVWEIDEYIDFEKIRKALPSSEDLVKLAPDFDKIVESLSLLKDFFTSGSPEETAFRATDRGSESDKHFRKVSDKEKIDQLQEELLHTQLKYQRILERLEKENKELRKLVLQKDDKGIHHRKLKKSLIDMYSEVLDVLSDYDASYNTQDHLPRVVVVGDQSAGKTSVLEMIAQARIFPRGSGEMMTRSPVKVTLSEGPHHVALFKDSSREFDLTKEEDLAALRHEIELRMRKNVKEGCTVSPETISLNVKGPGLQRMVLVDLPGVINTVTSGMAPDTKETIFSISKAYMQNPNAIILCIQDGSVDAERSIVTDLVSQMDPHGRRTIFVLTKVDLAEKNVASPSRIQQIIEGKLFPMKALGYFAVVTGKGNSSESIEAIREYEEEFFQNSKLLKTSMLKAHQVTTRNLSLAVSDCFWKMVRESVEQQADSFKATRFNLETEWKNNYPRLRELDRNELFEKAKNEILDEVISLSQVTPKHWEEILQQSLWERVSTHVIENIYLPAAQTMNSGTFNTTVDIKLKQWTDKQLPNKAVEVAWETLQEEFSRFMTEPKGKEHDDIFDKLKEAVKEESIKRHKWNDFAEDSLRVIQHNALEDRSISDKQQWDAAIYFMEEALQARLKDTENAIENMVGPDWKKRWLYWKNRTQEQCVHNETKNELEKMLKCNEEHPAYLASDEITTVRKNLESRGVEVDPSLIKDTWHQVYRRHFLKTALNHCNLCRRGFYYYQRHFVDSELECNDVVLFWRIQRMLAITANTLRQQLTNTEVRRLEKNVKEVLEDFAEDGEKKIKLLTGKRVQLAEDLKKVREIQEKLDAFIEALHQEK

SEQ ID NO: 2334 - protein, 1179 aa, Homo sapiens
MIISPERLDPFADGGKTPDPKMNARTYMDVMREQHLTKEEREIRQQLAEKAKAGELKVVNGAAASQPPSKRKRRWDQTADQTPGATPKKLSSWDQAETPGHTPSLRWDETPGRAKGSETPGATPGSKIWDPTPSHTPAGAATPGRGDTPGHATPGHGGATSSARKNRWDETPKTERDTPGHGSGWAETPRTDRGGDSIGETPTPGASKRKSRWDETPASQMGGSTPVLTPGKTPIGTPAMNMATPTPGHIMSMTPEQLQAWRWEREIDERNRPLSDEELDAMFPEGYKVLPPPAGYVPIRTPARKLTATPTPLGGMTGFHMQTEDRTMKSVNDQPSGNLPFLKPDDIQYFDKLLVDVDESTLSPEEQKERKIMKLLLKIKNGTPPMRKAALRQITDKAREFGAGPLFNQILPLLMSPTLEDQERHLLVKVIDRILYKLDDLVRPYVHKILVVIEPLLIDEDYYARVEGREIISNLAKAAGLATMISTMRPDIDNMDEYVRNTTARAFAVVASALGIPSLLPFLKAVCKSKKSWQARHTGIKIVQQIAILMGCAILPHLRSLVEIIEHGLVDEQQKVRTISALAIAALAEAATPYGIESFDSVLKPLWKGIRQHRGKGLAAFLKAIGYLIPLMDAEYANYYTREVMLILIREFQSPDEEMKKIVLKVVKQCCGTDGVEANYIKTEILPPFFKHFWQHRMALDRRNYRQLVDTTVELANKVGAAEIISRIVDDLKDEAEQYRKMVMETIEKIMGNLGAADIDHKLEEQLIDGILYAFQEQTTEDSVMLNGFGTVVNALGKRVKPYLPQICGTVLWRLNNKSAKVRQQAADLISRTAVVMKTCQEEKLMGHLGVVLYEYLGEEYPEVLGSILGALKAIVNVIGMHKMTPPIKDLLPRLTPILKNRHEKVQENCIDLVGRIADRGAEYVSAREWMRICFELLELLKAHKKAIRRATVNTFGYIAKAIGPHDVLATLLNNLKVQERQNRVCTTVAIAIVAETCSPFTVLPALMNEYRVPELNVQNGVLKSLSFLFEYIGEMGKDYIYAVTPLLEDALMDRDLVHRQTASAVVQHMSLGVYGFGCEDSLNHLLNYVWPNVFETSPHVIQAVMGALEGLRVAIGPCRMLQYCLQGLFHPARKVRDVYWKIYNSIYIGSQDALIAHYPRIYNDDKNTYIRYELDYIL

SEQ ID NO: 2335 - protein, 806 aa, Homo sapiens
MIKSVKRAYHRLCLHCSVDQEGKSVLSEKFILKVRPAFKAVPVVSVSKASYLLREGEEFTVTCTIKDVSSSVYSTWKRENSQTKLQEKYNSWHHGDFNYERQATLTISSARVNDSGVFMCYANNTFGSANVTTTLEVVDKGFINIFPMINTTVFVNDGENVDLIVEYEAFPKPEHQQWIYMNRTFTDKWEDYPKSENESNIRYVSELHLTRLKGTEGGTYTFLVSNSDVNAAIAFNVYVNTKPEILTYDRLVNGMLQCVAAGFPEPTIDWYFCPGTEQRCSASVLPVDVQTLNSSGPPFGKLVVQSSIDSSAFKHNGTVECKAYNDVGKTSAYFNFAFKGNNKEQIHPHTLFTPLLIGFVIVAGMMCIIVMILTYKYLQKPMYEVQWKVVEEINGNNYVYIDPTQLPYDHKWEFPRNRLSFGKTLGAGAFGKVVEATAYGLIKSDAAMTVAVKMLKPSAHLTEREALMSELKVLSYLGNHMNIVNLLGACTIGGPTLVITEYCCYGDLLNFLRRKRDSFICSKQEDHAEAALYKNLLHSKESSCSDSTNEYMDMKPGVSYVVPTKADKRRSVRIGSYIERDVTPAIMEDDELALDLEDLLSFSYQVAKGMAFLASKNCIHRDLAARNILLTHGRITKICDFGLARDIKNDSNYVVKGNARLPVKWMAPESIFNCVYTFESDVWSYGIFLWELFSLGSSPYPGMPVDSKFYKMIKEGFRMLSPEHAPAEMYDIMKTCWDADPLKRPTFKQIVQLIEKQISESTNHIYSNLANCSPNRQKPVVDHSVRINSVGSTASSSQPLLVHDDV

SEQ ID NO: 2336 - protein, 890 aa, Homo sapiens
MNYVGQLAGQVFVTVKELYKGLNPATLSGCIDIIVIRQPNGNLQCSPFHVRFGKMGVLRSREKVVDIEINGESVDLHMKLGDNGEAFFVQETDNDQEVIPMHLATSPILSEGASRMECQLKRGSVDRMRGLDPSTPAQVIAPSETPSSSSVVKKRRKRRRKSQLDSLKRDDNMNTSEDEDMFPIEMSSDEAMELLESSRTLPNDIPPFQDDIPEENLSLAVIYPQSASYPNSDREWSPTPSPSGSRPSTPKSDSELVSKSTERTGQKNPEMLWLWGELPQAAKSSSPHKMKESSPLSSRKICDKSHFQAIHSESSDTFSDQSPTLVGGALLDQNKPQTEMQFVNEEDLETLGAAAPLLPMIEELKPPSASVVQTANKTDSPSRKRDKRSRHLGADGVYLDDLTDMDPEVAALYFPKNGDPSGLAKHASDNGARSANQSPQSVGSSGVDSGVESTSDGLRDLPSIAISLCGGLSDHREITKDAFLEQAVSYQQFVDNPAIIDDPNLVVKIGSKYYNWTTAAPLLLAMQAFQKPLPKATVESIMRDKMPKKGGRWWFSWRGRNTTIKEESKPEQCLAGKAHSTGEQPPQLSLATRVKHESSSSDEERAAAKPSNAGHLPLLPNVSYKKTLRLTSEQLKSLKLKNGPNDVVFSVTTQYQGTCRCEGTIYLWNWDDKVIISDIDGTITRSDTLGHILPTLGKDWTHQGIAKLYHKVSQNGYKFLYCSARAIGMADMTRGYLHWVNERGTVLPQGPLLLSPSSLFSALHREVIEKKPEKFKVQCLTDIKNLFFPNTEPFYAAFGNRPADVYSYKQVGVSLNRIFTVNPKGELVQEHAKTNISSYVRLCEVVDHVFPLLKRSHSSDFPCSDTFSNFTFWREPLPPFENQDIHSASA

SEQ ID NO: 2337 - protein, 114 aa, Homo sapiens
MFSSTWKDRQQPTLIWKTGPRLDTRGTKPGMGWPLCPRRRDGQNGPRVLFPEKGEKDGIATHPPTLVREENLCFWSFSRDCVLQVQKTACYLQARFSRAHGSPVAFSVNLAGMD

SEQ ID NO: 2338 - protein, 112 aa, Homo sapiens
MAAALARLGLRPVKQVRVQFCPFEKNVESTRTFLQTVSSEKVRSTNLNCSVIADVRHDGSEPCVDVLFGDGHRLIMRGAHLTALEMLTAFASHIRARDAAGSGDKPGADTGR

SEQ ID NO: 2339 - protein, 270 aa, Homo sapiens
MAELASWALLVVVVQVALLESEDLMEMLVALGSLVSWDPEVFLVPLEISAPLEKKVLSASLASTAGLAQLAQLEQEESLATLDSLDPKAPLVILAKTVIKVMLVLLVLGVLQVLMETMVLRDLLDHRVFKVEKVNRVPLVLQASRVCLAPQVPLVKLANQEKGVSMVSLVSLVLLVQEGNAVPQVRVVLPVLLVLLEAEVLLDPQGLMETRVNLVWLVLWALLVHLVLVDSQERGVLLAYLEAREKRVNLVSEVKLVTLAEMVLVVLLVL

SEQ ID NO: 2340 - protein, 458 aa, Homo sapiens
MASTITGSQDCIVNHRGEVDGEPELDISPCQQWGEASSPISRNRDSVMTLQSGCFENIESETYLPLKVSSQIDTQDSSVKFCKNEPQDHQESRRLFVMEESTERKVIKGESCSENLQVKLVSDGQELASPLLNGEATCQNGQLKESLDPIDCNCKDIHGWKSQVVSCSQQRAHTEEKPCDHNNCGKILNTSPDGHPYEKIHTAEKQYECSQCGKNFSQSSELLLHQRDHTEEKPYKCEQCGKGFTRSSSLLIHQAVHTDEKPYKCDKCGKGFTRSSSLLIHHAVHTGEKPYKCDKCGKGFSQSSKLHIHQRVHTGEKPYECEECGMSFSQRSNLHIHQRVHTGERPYKCGECGKGFSQSSNLHIHRCIHTGEKPYQCYECGKGFSQSSDLRIHLRVHTGEKPYHCGKCGKGFSQSSKLLIHQRVHTGEKPYECSKCGKGFSQSSNLHIHQRVHKKDPR

SEQ ID NO: 2341 - protein, 609 aa, Homo sapiens
MPSDPPFNTRRAYTSEDEAWKSYLENPLTAATKAMMSINGDEDSAAALGLLYDYYKVPRDKRLLSVSKASDSQEDQEKRNCLGTSEAQSNLSGGENRVQVLKTVPVNLSLNQDHLENSKREQYSISFPESSAIIPVSGITVVKAEDFTPVFMAPPVHYPRGDGEEQRVVIFEQTQYDVPSLATHSAYLKDDQRSTPDSTYSESFKDAATEKFRSASVGAEEYMYDQTSSGTFQYTLEATKSLRQKQGEGPMTYLNKGQFYAITLSETGDNKCFRHPISKVRSVVMVVFSEDKNRDEQLKYWKYWHSRQHTAKQRVLDIADYKESFNTIGNIEEIAYNAVSFTWDVNEEAKIFITVNCLSTDFSSQKGVKGLPLMIQIDTYSYNNRSNKPIHRAYCQIKVFCDKGAERKIRDEERKQNRKKGKGQASQTQCNSSSDGKLAAIPLQKKSDITYFKTMPDLHSQPVLFIPDVHFANLQRTGQVYYNTDDEREGGSVLVKRMFRPMEEEFGPVPSKQMKEEGTKRVLLYVRKETDDVFDALMLKSPTVKGLMEAISEKYGLPVEKIAKLYKKSKKGILVNMDDNIIEHYSNEDTFILNMESMVEGFKVTLMEI

SEQ ID NO: 2342 - protein, 906 aa, Homo sapiens
MVGLLLFFFPAIFLEVSLLPRSPGRKVLLAGASSQRSVARMDGDVIIGALFSVHHQPPAEKVPERKCGEIREQYGIQRVEAMFHTLDKINADPVLLPNITLGSEIRDSCWHSSVALEQSIEFIRDSLISIRDEKDGINRCLPDGQSLPPGRTKKPIAGVIGPGSSSVAIQVQNLLQLFDIPQIAYSATSIDLSDKTLYKYFLRVVPSDTLQARAMLDIVKRYNWTYVSAVHTEGNYGESGMDAFKELAAQEGLCIAHSDKIYSNAGEKSFDRLLRKLRERLPKARVVVCFCEGMTVRGLLSAMRRLGVVGEFSLIGSDGWADRDEVIEGYEVEANGGITIKLQSPEVRSFDDYFLKLRLDTNTRNPWFPEFWQHRFQCRLPGHLLENPNFKRICTGNESLEENYVQDSKMGFVINAIYAMAHGLQNMHHALCPGHVGLCDAMKPIDGSKLLDFLIKSSFIGVSGEEVWFDEKGDAPGRYDIMNLQYTEANRYDYVHVGTWHEGVLNIDDYKIQMNKSGVVRSVCSEPCLKGQIKVIRKGEVSCCWICTACKENEYVQDEFTCKACDLGWWPNADLTGCEPIPVRYLEWSNIESIIAIAFSCLGILVTLFVTLIFVLYRDTPVVKSSSRELCYIILAGIFLGYVCPFTLIAKPTTTSCYLQRLLVGLSSAMCYSALVTKTNRIARILAGSKKKICTRKPRFMSAWAQVIIASILISVQLTLVVTLIIMEPPMPILSYPSIKEVYLICNTSNLGVVAPLGYNGLLIMSCTYYAFKTRNVPANFNEAKYIAFTMYTTCIIWLAFVPIYFGSNYKIITTCFAVSLSVTVALGCMFTPKMYIIIAKPERNVRSAFTTSDVVRMHVGDGKLPCRSNTFLNIFRRKKAGAGNAKKRQPEFSPTSQCPSAHVQL

SEQ ID NO: 2343 - protein, 292 aa, Homo sapiens
MSASVKESLQLQLLEMEMLFSMFPNQGEVKLEDVNALTNIKRYLEGTREALPPKIEFVITLQIEEPKVKIDLQVTMPHSYPYVALQLFGRSSELDRHQQLLLNKGLTSYIGTFDPGELCVCAAIQWLQDNSASYFLNRKLVYEPSTQAKPVKNTFLRMWIYSHHIYQQDLRKKILDVGKRLDVTGFCMTGKPGIICVEGFKEHCEEFWHTIRYPNWKHISCKHAESVETEGNGEDLRLFHSFEELLLEAHGDYGLRNDYHMNLGQFLEFLKKHKSEHVFQILFGIESKSSDS

SEQ ID NO: 2344 - protein, 1019 aa, Homo sapiens
MDLNNNSLKTKAQVPMVLTAGPKWLLDVTWQGVEDNKNNCIVYSKGGQLWCTTTKAISEGEELIAFVVDFDSRLQAASQMTLTEGMYPARLLDSIQLLPQQAAMASILPTAIVNKDIFPCKSCGIWYRSERNLQAHLMYYCSGRQREAAPVSEENEDSAHQISSLCPFPQCTKSFSNARALEMHLNSHSGVKMEEFLPPGASLKCTVCSYTADSVINFHQHLFSHLTQAAFRCNHCHFGFQTQRELLQHQELHVPSGKLPRESDMEHSPSATEDSLQPATDLLTRSELPQSQKAMQTKDASSDTELDKCEKKTQLFLTNQRPEIQPTTNKQSFSYTKIKSEPSSPRLASSPVQPNIGPSFPVGPFLSQFSFPQDITMVPQASEILAKMSELVHRRLRHGSSSYPPVIYSPLMPKGATCFECNITFNNLDNYLVHKKHYCSSRWQQMAKSPEFPSVSEKMPEALSPNTGQTSINLLNPAAHSADPENPLLQTSCINSSTVLDLIGPNGKGHDKDFSTQTKKLSTSSNNDDKINGKPVDVKNPSVPLVDGESDPNKTTCEACNITFSRHETYMVHKQYYCATRHDPPLKRSASNKVPAMQRTMRTRKRRKMYEMCLPEQEQRPPLVQQRFLDVANLNNPCTSTQEPTEGLGDCYHPRCDIFPGIVSKHLETSLTINKCVPVSKCDTTHSSVSCLEMDVPIDLSKKCLSQSERTTTSPKRLLDYHECTVCKISFNKVENYLAHKQNFCPVTAHQRNDLGQLDGKVFPNPESERNSPDVSYERSIIKCEKNGNLKQPSPNGNLFSSHLATLQGLKVFSEAAQLIATKEENRHLFLPQCLYPGAIKKAKGADQLSPYYGIKPSDYISGSLVIHNTDIEQSRNAENESPKGQASSNGCAALKKDSLPLLPKNRGMVIVNGGLKQDERPAANPQQENISQNPQHEDDHKSPSWISENPLAANENVSPGIPSAEEQLSSIAKGVNGSSQAPTSGKYCRLCDIQFNNLSNFITHKKFYCSSHAAEHVK

SEQ ID NO: 2345 - protein, 443 aa, Homo sapiens
MDSRAQLWGLALNKRRATLPHPGGSTNLKADPEELFTKLEKIGKGSFGEVFKGIDNRTQKVVAIKIIDLEEAEDEIEDIQQEITVLSQCDSPYVTKYYGSYLKDTKLWIIMEYLGGGSALDLLEPGPLDETQIATILREILKGLDYLHSEKKIHRDIKAANVLLSEHGEVKLADFGVAGQLTDTQIKRNTFVGTPFWMAPEVIKQSAYDSKADIWSLGITAIELARGEPPHSELHPMKVLFLIPKNNPPTLEGNYSKPLKEFVEACLNKEPSFRPTAKELLKHKFILRNAKKTSYLTELIDRYKRWKAEQSHDDSSSEDSDAETDGQASGGSDSGDWIFTIREKDPKNLENGALQPSDLDRNKMKDIPKRPFSQCLSTIISPLFAELKEKSQACGGNLGSIEELRGAIYLAEEACPGISDTMVAQLVQRLQRYSLSGGGTSSH

SEQ ID NO: 2346 - protein, 592 aa, Homo sapiens
MFPDNFVKEIKRETEFKDDSLPIKRERHGNVASLVQRISTYGLPAGGIQPHPQTKNIKKKTKKRQCKVLFEYIPQNEDELELKVGDIIDINEEVEEGWWSGTLNNKLGLFPSNFVKELEVTDDGETHEAQDDSETVLAGPTSPIPSLGNVSETASGSVTQPKKIRGIGFGDIFKEGSVKLRTRTSSSETEEKKPEKPLILQSLGPKTQSVEITKTDTEGKIKAKEYCRTLFAYEGTNEDELTFKEGEIIHLISKETGEAGWWRGELNGKEGVFPDNFAVQINELDKDFPKPKKPPPPAKAPAPKPELIAAEKKYFSLKPEEKDEKSTLEQKPSKPAAPQVPPKKPTPPTKASNLLRSSGTVYPKRPEKPVPPPPPIAKINGEVSSISSKFETEPVSKLKLDSEQLPLRPKSVDFDSLTVRTSKETDVVNFDDIASSENLLHLTANRPKMPGRRLPGRFNGGHSPTHSPEKILKLPKEEDSANLKPSELKKDTCYSPKPSVYLSTPSSASKANTTAFLTPLEIKAKVETDDVKKNSLDELRAQIIELLCIVEALKKDHGKELEKLRKDLEEEKTMRSNLEMEIEKLKKAVLSS

SEQ ID NO: 2347 - protein, 1130 aa, Homo sapiens
MAHAGGGSGGSGAGGPAGRGLSGARWGRSGSAGHEKLPVHVEDALTYLDQVKIRFGSDPATYNGFLEIMKEFKSQSIDTPGVIRRVSQLFHEHPDLIVGFNAFLPLGYRIDIPKNGKLNIQSPLTSQENSHNHGDGAEDFKQQVPYKEDKPQVPLESDSVEFNNAISYVNKIKTRFLDHPEIYRSFLEILHTYQKEQLNTRGRPFRGMSEEEVFTEVANLFRGQEDLLSEFGQFLPEAKRSLFTGNGPCEMHSVQKNEHDKTPEHSRKRSRPSLLRPVSAPAKKKMKLRGTKDLSIAAVGKYGTLQEFSFFDKVRRVLKSQEVYENFLRCIALFNQELVSGSELLQLVSPFLGKFPELFAQFKSFLGVKELSFAPPMSDRSGDGISREIDYASCKRIGSSYRALPKTYQQPKCSGRTAICKEVLNDTWVSFPSWSEDSTFVSSKKTPYEEQLHRCEDERFELDVVLETNLATIRVLESVQKKLSRMAPEDQEKFRLDDSLGGTSEVIQRRAIYRIYGDKAPEIIESLKKNPVTAVPVVLKRLKAKEEEWREAQQGFNKIWREQYEKAYLKSLDHQAVNFKQNDTKALRSKSLLNEIESVYDEHQEQHSEGRSAPSSEPHLIFVYEDRQILEDAAALISYYVKRQPAIQKEDQGTIHQLLHQFVPSLFFSQQLDLGASEESADEDRDSPQGQTTDPSERKKPAPGPHSSPPEEKGAFGDAPATEQPPLPPPAPHKPLDDVYSLFFANNNWYFFLRLHQTLCSRLLKIYRQAQKQLLEYRTEKEREKLLCEGRREKGSDPAMELRLKQPSEVELEEYYPAFLDMVRSLLEGSIDPTQYEDTLREMFTIHAYVGFTMDKLVQNIARQLHHLVSDDVCLKVVELYLNEKKRGAAGGNLSSRCVRAARETSYQWKAERCMADENCFKVMFLQRKGQVIMTIELLDTEEAQTEDPVEVQHLARYVEQYVGTEGASSSPTEGFLLKPVFLQRNLKKFRRRWQSEQARALRGEARSSWKRLVGVESACDVDCRFKLSTHKMVFIVNSEDYMYRRGTLCRAKQVQPLVLLRHHQHFEEWHSRWLEDNVTVEAASLVQDWLMGEEDEDMVPCKTLCETVHVHGLPVTRYRVQYSRRPASP

SEQ ID NO: 2348 - protein, 466 aa, Homo sapiens [sequence omitted]

SEQ ID NO: 2349 - protein, 843 aa, Homo sapiens
  VARIANT 293, 294, 295, 296, 297, 298, 299, 300, 301, 302, 303, 304,305, 306, 307, 308, 309, 310, 311, 312, 313, 314, 315, 316,317, 318, 319, 320, 321, 322, 323, 324, 325, 326, 327, 328,329, 330, 331, 332, 333, 334, 335, 336, 337, 338, 339: Xaa = Any Amino Acid
  VARIANT 340, 341, 342, 343: Xaa = Any Amino Acid
MCCNKQVIVIDKIKSASIADRCGALHVGDHILSIDGTSMEYCTLAEATQFLANTTDQVKLEILPHHQTRLALKGPDHVKIQRSDRQLTWDSWASNHSSLHTNHHYNTYHPDHCRVPALTFPKAPPPNSPPALVSSSFSPTSMSAYSLSSLNMGTLPRSLYSTSPRGTMMRRRLKKKDFKSSLSLASSTVGLAGQVVHTETTEVVLTADPVTGFGIQLQGSVFATETLSSPPLISYIEADSPAERCGVLQIGDRVMAINGIPTEDSTFEEASQLLRDSSITSKVTLEIEFDVAXXXXXXXXXXXXXXXXXXXXXXXXXXXXXXXXXXXXXXXXXXXXXXXXXXXTGTLELGDKLLAIDNIRLDNCSMEDAVQILQQCEDLVKLKIRKDEDNSDEQESSGAIIYTVELKRYGGPLGITISGTEEPFDPIIISSLTKGGLAERTGAIHIGDRILAINSSSLKGKPLSEAIHLLQMAGETVTLKIKKQTDAQSASSPKKFPISSHLSDLGDVEEDSSPAQKPGKLSDMYPSTVPSVDSAVDSWDGSAIDTSYGTEGTSFQASGYNFNTYDWRSPKQRGSLSPVTKPRSQTYPDVGLSYEDWDRSTASGFAGAADSAETEQEENFWSQALEDLETCGQSGILRELEATIMSGSTMSLNHEAPTPRSQLGRQASFQERSSSRPHYSQTTRSNTLPSDVGRKSVTLRKMKQEIKEIMSPTPVELHKVTLYKDSDMEDFGFSVADGLLEKGVYVKNIRPAGPGDLGGLKPYDRLLQVNHVRTRDFDCCLVVPLIAESGNKLDLVISRNPLASQKSIDQQSLPGDWSEQNSAFFQQPSHGGNLETREPTNTL

SEQ ID NO: 2350 - protein, 89 aa, Homo sapiens
MAAPKVRFMTKIYHPNVDKLGRICLDILKDKWSPALQIRTVLLSIQALLSAPNPDDPLANDVAEQWKTNEAQAIETARAWTRLYAMNNI

SEQ ID NO: 2351 - protein, 148 aa, Homo sapiens
MKVRKCSTPEEIKKRKKAVIFCLSADKKCIIVEEGKEILVGDVGVTITDPFKHFVGMLPEKDCRYALYDASFETKESRKEELMFFLWAPELAPLKSKMIYASSKDAIKKKFQGIKHECQANGPEDLNRACIAEKLGGSLIVAFEGCPV

SEQ ID NO: 2352 - protein, 260 aa, Homo sapiens
MEKCEAAAKDIRGETLNHHVNARHLDLASLKSIREFAAKIIEEEERVDILINNAGVMRCPHWTTEDGFEMQFGVNHLGHFLLTNLLLDKLKASAPSRIINLSSLAHVAGHIDFDDLNWQTRKYNTKAAYCQSKLAIVLFTKELSRRLQGSGVTVNALHPGVARTELGRHTGIHGSTFSSTTLGPIFWLLVKSPELAAQPSTYLAVAEELADVSGKYFDGLKQKAPAPEAEDEEVARRLWAESARLVGLEAPSVREQPLPR

SEQ ID NO: 2353 - protein, 210 aa, Homo sapiens; identical to SEQ ID NO: 52

SEQ ID NO: 2354 - protein, 407 aa, Homo sapiens
MCWLYALEVVERECWVSPGDLSSDGLLFRLGPPKPPTELEPEPEIEGLLTPVLEAGDVDEGPVARPLSPTRLQPALPPEAQSVPELEEVARVLAEIPRPLKRRGSMEQAPAVALPPTHKKQYQQIISRLFHRHGGPGPGGPEPELSPITEGSEARAGPPAPAPPAPIPPPAPSQSSPPEQPQSMEMRSVLRKAGSPRKARRARLNPLVLLLDAALTGELEVVQQAVKEMNDPSQPNEEGITALHNAICGANYSIVDFLITAGANVNSPDSHGWTPLHCAASCNDTVICMALVQHGAAIFATTLSDGATAFEKCDPYREGYADCATYLADVEQSMGLMNSGAVYALWDYSAEFGDELSFREGESVTVLRRDGPEETDWWWAALHGQEGYVPRNYFGLFPRVKPQRSKV

SEQ ID NO: 2355 - protein, 527 aa, Homo sapiens
MAQTLQMEIPNFGNSILECLNEQRLQGLYCDVSVVVKGHAFKAHRAVLAASSSYFRDLFNNSRSAVVELPAAVQPQSFQQILSFCYTGRLSMNVGDQFLLMYTAGFLQIQEIMEKGTEFFLKVSSPSCDSQGLHAEEAPSSEPQSPVAQTSGWPACSTPLPLVSRVKTEQQESDSVQCMPVAKRLWDSGQKEAGGGGNGSRKMAKFSTPDLAANRPHQPPPPQQAPVVAAAQPAVAAGAGQPAGGVAAAGGVVSGPSTSERTSPGTSSAYTSDSPGSYHNEEDEEEDGGEEGMDEQYRQICNMYTMYSMMNVGQTAEKVEALPEQVAPESRNRIRVRQDLASLPAELINQIGNRCHPKLYDEGDPSEKLELVTGTNVYITRAQLMNCHVSAGTRHKVLLRRLLASFFDRNTLANSCGTGIRSSTNDPRRKPLDSRVLHAVKYYCQNFAPNFKESEMNAIAADMCTNARRVVRKSWMPKVKVLKAEDDAYTTFISETGKIEPDMMGVEHGFETASHEGEAGPSAEALQ

SEQ ID NO: 2356 - protein, 351 aa, Homo sapiens
MEPAPGLVEQPKCLEAGSPEPEPAPWQALPVLSEKQSGDVELVLAYAAPVLDKRQTSRLLKEVSALHPLPAQPHLKRVRPSRDAGSPHALEMLLCLAGPASGPRSLAELLPRPAVDPRGLGQPFLVPVPARPPLTRGQFEEARAHWPTSFHEDKQVTSALAGRLFSTQERAAMQSHMERAVWAARRAAARGLRAVGAVVVDPASDRVLATGHDCSCADNPLLHAVMVCVDLVARGQGRGTYDFRPFPACSFAPAAAPQAVRAGAVRKLDADEDGLPYLCTGYDLYVTREPCAMCAMALVHARILRVFYGAPSPDGALGTRFRIHARPDLNHRFQVFRGVLEEQCRWLDPDT

SEQ ID NO: 2357 - protein, 1441 aa, Homo sapiens
MRAGVQTGDRIIKVNGTLVTHSNHLEVVKLIKSGSYVALTVQGRPPGSPQIPLADSEVEPSVIGHMSPIMTSPHSPGASGNMERITSPVLMGEENNVVHNQKVEILRKMLQKEQERLQLLQEDYNRTPAQRLLKEIQEAKKHIPQLQEQLSKATGSAQDGAVVTPSRPLGDTLTVSEAETDPGDVLGRTDCSSGDASRPSSDNADSPKSGPKERIYLEENPEKSETIQDTDTQSLVGSPSTRIAPHIIGAEDDDFGTEHEQINGQCSCFQSIELLKSRPAHLAVFLHHVVSQFDPATLLCYLYSDLYKHTNSKETRRIFLEFHQFFLDRSAHLKVSVPDEMSADLEKRRPELIPEDLHRHYIQTMQERVHPEVQRHLEDFRQKRSMGLTLAESELTKLDAERDKDRLTLEKERTCAEQIVAKIEEVLMTAQAVEEDKSSTMQYVILMYMKHLGVKVKEPRNLEHKRGRIGFLPKIKQSMKKDKEGEEKGKRRGFPSILGPPRRPSRHDNSAIGRAMELQKARHPKHLSTPSSVSPEPQDSAKLRQSGLANEGTDAGYLPANSMSSVASGASFSQEGGKENDTGSKQVGETSAPGDTLDGTPRTLNTVFDFPPPPLDQVQEEECEVERVTEHGTPKPFRKFDSVAFGESQSEDEQFENDLETDPPNWQQLVSREVLLGLKPCEIKRQEVINELFYTERAHVRTLKVLDQVFYQRVSREGILSPSELRKIFSNLEDILQLHIGLNEQMKAVRKRNETSVIDQIGEDLLTWFSGPGEEKLKHAAATFCSNQPFALEMIKSRQKKDSRFQTFVQDAESNPLCRRLQLKDIIPTQMQRLTKYPLLLDNIAKYTEWPTEREKVKKAADHCRQILNYVNQAVKEAENKQRLEDYQRRLDTSSLKLSEYPNVEELRNLDLTKRKMIHEGPLVWKVNRDKTIDLYTLLLEDILVLLQKQDDRLVLRCHSKILASTADSKHTFSPVIKLSTVLVRQVATDNKALFVISMSDNGAQIYELVAQTVSEKTVWQDLICRMAASVKEQSTKPIPLPQSTPGEGDNDEEDPSKLKEEQHGISVTGLQSPDRDLGLESTLISSKPQSHSLSTSGKSEVRDLFVAERQFAKEQHTDGTLKEVGEDYQIAIPDSHLPVSEERWALDALRNLGLLKQLLVQQLGLTEKSVQEDWQHFPRYRTASQGPQTDSVIQNSENIKAYHSGEGHMPFRTGTGDIATCYSPRTSTESFAPRDSVGLAPQDSQASNILVMDHMIMTPEMPTMEPEGGLDDSGEHFFDAREAHSDENPSEGDGAVNKEEKDVNLRISGNYLILDGYDPVQESSTDEEVASSLTLQPMTGIPAVESTHQQQHSPQNTHSDGAISPFTPEFLVQQRWGAMEYSCFEIQSPSSCADSQSQIMEYIHKIEADLEHLKKVEESYTILCQRLAGSALTDKHSDKS

SEQ ID NO: 2358 - protein, 210 aa, Homo sapiens
MRCLTTPMLLRALAQAARAGPPGGRSLHSSAVAATYKYVNMQDPEMDMKSVTDRAARTLLWTELFRGLGMTLSYLFREPATINYPFEKGPLSPRFRGEHALRRYPSGEERCIACKLCEAICPAQAITIEAEPRADGSRRTTRYDIDMTKCIYCGFCQEACPVDAIVEGPNFEFSTETHEELLYTKEKLLNNGDKWEAEIAANIQADYLYR

SEQ ID NO: 2359 - protein, 583 aa, Homo sapiens
  VARIANT 530, 531, 532, 533, 534, 535, 536, 537, 538, 539, 540, 541,542, 543, 544, 545, 546, 547, 548, 549, 550, 551: Xaa = Any Amino Acid
MGAVYQAAALSKAFKVKPFVVRDAVVYPILVEFTREVEEEPGIHSLKHNKRVLFSRMGPYPQRKVITFNRYSHDFNFHINYGDLGFLGPEDLRVFGSQNLTTVKLKGVGDSFKKYPDYESKGIKAHFNLDESGVLSLDRVESVFETLVEDSAEEESTLTKLGNTISSLFGGGTTPDAKENGTDTVQEEEESPAEGSKDEPGEQVELKEEAEAPVEDGSQPPPPEPKGDATPEGEKATEKENGDKSEAQKPSEKAEAGPEGVAPAPEGEKKQKPARKRRMVEEIGVELVVLDLPDLPEDKLAQSVQKLQDLTLRDLEKQEREKAANSLEAFIFETQDKLYQPEYQEVSTEEQREEISGKLSAASTWLEDEGVGATTVMLKEKLAELRKLCQGLFFRVEERKKWPERLSALDNLLNHSSMFLKGARLIPEMDQIFTEVEMTTLEKVINETWAWKNATLAEQAKLPATEKPVLLSKDIEAKMMALDREVQYLLNKAKFTKPRPRPKTRMGPGQSHPSMPVPVTRGKKVIPPAXXXXXXXXXXXXXXXXXXXXXXDTEPLELGGPGAEPEQKEQSTGQKRPLKNDEL

SEQ ID NO: 2360 - protein, 665 aa, Homo sapiens
MSHFEPNEYIHYDLLEKNINIVRKRLNRPLTLSEKIVYGHLDDPASQEIERGKSYLRLRPDRVAMQDATAQMAMLQFISSGLSKVAVPSTIHCDHLIEAQVGGEKDLRRAKDINQEVYNFLATAGAKYGVGFWKPGSGIIHQIILENYAYPGVLLIGTDSHTPNGGGLGGICIGVGGADAVDVMAGIPWELKCPKVIGVKLTGSLSGWSSPKDVILKVAGILTVKGGTGAIVEYHGPGVDSISCTGMATICNMGAEIGATTSVFPYNHRMKKYLSKTGREDIANLADEFKDHLVPDPGCHYDQLIEINLSELKPHINGPFTPDLAHPVAEVGKVAEKEGWPLDIRVGLIGSCTNSSYEDMGRSAAVAKQALAHGLKCKSQFTITPGSEQIRATIERDGYAQILRDLGGIVLANACGPCIGQWDRKDIKKGEKNTIVTSYNRNFTGRNDANPETHAFVTSPEIVTALAIAGTLKFNPETDYLTGTDGKKFRLEAPDADELPKGEFDPGQDTYQHPPKDSSGQHVDVSPTSQRLQLLEPFDKWDGKDLEDLQILIKVKGKCTTDHISAAGPWLKFRGHLDNISNNLLIGAINIENGKANSVRNAVTQEFGPVPDTARYYKKHGIRWVVIGDENYGEGSSREHAALEPRHLGGRAIITKSFARIHGPT

SEQ ID NO: 2361 - protein, 291 aa, Homo sapiens
MVLFPVWFLYSLLMKLFQRSTPAITLESPDIKYPLRLIDREIISHDTRRFRFALPSPQHILGLPVGQHIYLSARIDGNLVVRPYTPISSDDDKGFVDLVIKVYFKDTHPKFPAGGKMSQYLESMQIGDTIEFRGPSGLLVYQGKGKFAIRPDKKSNPIIRTVKSVGMIAGGTGITPMLQVIRAIMKDPDDHTVCHLLFANQTEKDILLRPELEELRNKHSARFKLWYTLDRAPEAWDYGQGFVNEEMIRDHLPPPEEEPLVLMCGPPPMIQYACLPNLDHVGHPTERCFVF

SEQ ID NO: 2362 - protein, 336 aa, Homo sapiens
MFGSVALGPVCPTVCPPGGIHQVTVNESLLAPLNVELDPEIQKVRAQEREQIKALNNKFASFIDKVRFLEQQNQVLETKWELLQQLDLNNCKNNLEPILEGYISNLRKQLETLSGDRVRLDSELRNVRDVVEDYKKRYEEEINKRTAAENEFVLLKKDVDAAYANKVELQAKVESMDQEIKFFRCLFEAEITQIQSHISDMSVILSMDNNRNLDLDSIIDEVRTQYEEIALKSKAEAEALYQTKFQELQLAAGRHGDDLKNTKLGEIPPCTHPINSLAVVPQLHHQPRSWLPAFLLCPASSAVANYSAGLPGSLPKAPHTLGPSIVPAYARSWLCV

SEQ ID NO: 2363 - protein, 808 aa, Homo sapiens
MVCNHLCSSDGCWGPGPDQCLSCRRFSRGRICIESCNLYDGEFREFENGSICVECDPQCEKMEDGLLTCHGPGPDNCTKCSHFKDGPNCVEKCPDGLQGANSFIFKYADPDRECHPCHPNCTQGCNGPTSHDCIYYPWTGHSTLPQHARTPLIAAGVIGGLFILVIVGLTFAVYVRRKSIKKKRALRRFLETELVEPLTPSGTAPNQAQLRILKETELKRVKVLGSGAFGTVYKGIWVPEGETVKIPVAIKILNETTGPKANVEFMDEALIMASMDHPHLVRLLGVCLSPTIQLVTQLMPHGCLLEYVHEHKDNIGSQLLLNWCVQIAKGMMYLEERRLVHRDLAARNVLVKSPNHVKITDFGLARLLEGDEKEYNADGGKMPIKWMALECIHYRKFTHQSDVWSYGVTIWELMTFGGKPYDGIPTREIPDLLEKGERLPQPPICTIDVYMVMVKCWMIDADSRPKFKELAAEFSRMARDPQRYLVIQGDDRMKLPSPNDSKFFQNLLDEEDLEDMMDAEEYLVPQAFNIPPPIYTSRARIDSNRSEIGHSPPPAYTPMSGNQFVYRDGGFAAEQGVSVPYRAPTSTIPEAPVAQGATAEIFDDSCCNGTLRKPVAPHVQEDSSTQRYSADPTVFAPERSPRGELDEEGYMTPMRDKPKQEYLNPVEENPFVSRRKNGDLQALDNPEYHNASNGPPKAEDEYVNEPLYLNTFANTLGKAEYLKNNILSMPEKAKKAFDNPDYWNHSLPPRSTLQHPDYLQEYSTKYFYKQNGRIRPIVAENPEYLSEFSLKPGTVLPPPPYRHRNTVV

SEQ ID NO: 2364 - protein, 525 aa, Homo sapiens
MAAVVLAATRLLRGSGSWGCSRLRFGPPAYRRFSSGGAYPNIPLSSPLPGVPKPVFATVDGQEKFETKVTTLDNGLRVASQNKFGQFCTVGILINSGSRYEAKYLSGIAHFLEKLAFSSTARFDSKDEILLTLEKHGGICDCQTSRDTTMYAVSADSKGLDTVVALLADVVLQPRLTDEEVEMTRMAVQFELEDLNLRPDPEPLLTEMIHEAAYRENTVGLHRFCPTENVAKINREVLHSYLRNYYTPDRMVLAGVGVEHEHLVDCARKYLLGVQPAWGSAEAVDIDRSVAQYTGGIAKLERDMSNVSLGPTPIPELTHIMVGLESCSFLEEDFIPFAVLNMMMGGGGSFSAGGPGKGMFSRLYLNVLNRHHWMYNATSYHHSYEDTGLLCIHASADPRQVREMVEIITKEFILMGGTVDTVELERAKTQLTSMLMMNLESRPVIFEDVGRQVLATRSRKLPHELCTLIRNVKPEDVKRVASKMLRGKPAVAALGDLTDLPTYEHIQTALSSKDGRLPRTYRLFR

SEQ ID NO: 2365 - protein, 367 aa, Homo sapiens [sequence omitted]

SEQ ID NO: 2366 - protein, 1066 aa, Homo sapiens [sequence omitted]

SEQ ID NO: 2367 - protein, 956 aa, Homo sapiens
MPGGAGAARLCLLAFALQPLRPRAAREPGWTSKGSEEGSPKLQHELIIPQWKTSESPVREKHPLKAELRVMAEGRELILDLEKNEQLFAPSYTETHYTSSGNPQTTTRKLEDHCFYHGTVRETELSSVTLSTCRGIRGLITVSSNLSYVIEPLPDSKGQHLIYRSEHLKPPPGNCGFEHSKPTTRDWALQFTQQTKKRPRRMKREDLNSMKYVELYLVADYLEFQKNRRDQDATKHKLIEIANYVDKFYRSLNIRIALVGLEVWTHGNMCEVSENPYSTLWSFLSWRRKLLAQKYHDNAQLITGMSFHGTTIGLAPLMAMCSVYQSGGVNMDHSENAIGVAATMAHEMGHNFGMTHDSADCCSASAADGGCIMAAATGHPFPKVFNGCNRRELDRYLQSGGGMCLSNMPDTRMLYGGRRCGNGYLEDGEECDCGEEEECNNPCCNASNCTLRPGAECAHGSCCHQCKLLAPGTLCREQARQCDLPEFCTGKSPHCPTNFYQMDGTPCEGGQAYCYNGMCLTYQEQCQQLWGPGARPAPDLCFEKVNVAGDTFGNCGKDMNGEHRKCNMRDAKCGKIQCQSSEARPLESNAVPIDTTIIMNGRQIQCRGTHVYRGPEEEGDMLDPGLVMTGTKCGYNHICFEGQCRNTSFFETEGCGKKCNGHGVCNNNQNCHCLPGWAPPFCNTPGHGGSIDSGPMPPESVGPVVAGVLVAILVLAVLMLMYYCCRQNNKLGQLKPSALPSKLRQQFSCPFRVSQNSGTGHANPTFKLQTPQGKRKVINTPEILRKPSQPPPRPPPDYLRGGSPPAPLPAHLSRAARNSPGPGSQIERTESSRRPPPSRPIPPAPNCIVSQDFSRPRPPQKALPANPVPGRRSLPRPGGASPLRPPGAGPQQSRPLAALAPKVSPREALKVKAGTRGLQGGRCRVEKTKQFMLLVVWTELPEQKPRAKHSCFLVPA

SEQ ID NO: 2368 - protein, 552 aa, Homo sapiens
METLESELTCPICLELFEDPLLLPCAHSLCFNCAHRILVSHCATNESVESITAFQCPTCRHVITLSQRGLDGLKRNVTLQNIIDRFQKASVSGPNSPSETRRERAFDANTMTSAEKVLCQFCDQDPAQDAVKTCVTCEVSYCDECLKATHPNKKPFTGHRLIEPIPDSHIRGLMCLEHEDEKVNMYCVTDDQLICALCKLVGRHRDHQVAALSERYDKLKQNLESNLTNLIKRNTELETLLAKLIQTCQHVEVNASRQEAKLTEECDLLIEIIQQRRQIIGTKIKEGKVMRLRKLAQQIANCKQCIERSASLISQAEHSLKENDHARFLQTAKNITERVSMATASSQVLIPEINLNDTFDTFALDFSREKKLLECLDYLTAPNPPTIREELCTASYDTITVHWTSDDEFSVVSYELQYTIFTGQANVVSLCNSADSWMIVPNIKQNHYTVHGLQSGTKYIFMVKAINQAGSRSSEPGKLKTNSQPFKLDPKSAHRKLKVSHDNLTVERDESSSKKSHTPERFTSQGSYGVAGNVFIDSGRHYWEVVISGSTW

SEQ ID NO: 2369 - protein, 1038 aa, Homo sapiens
MTSSLQRPWRVPWLPWTILLVSTAAASQNQERLCAFKDPYQQDLGIGESRISHENGTILCSKGSTCYGLWEKSKGDINLVKQGCWSHIGDPQECHYEECVVTTTPPSIQNGTYRFCCCSTDLCNVNFTENFPPPDTTPLSPPHSFNRDETIIIALASVSVLAVLIVALCFGYRMLTGDRKQGLHSMNMMEAAASEPSLDLDNLKLLELIGRGRYGAVYKGSLDERPVAVKVFSFANRQNFINEKNIYRVPLMEHDNIARFIVGDERVTADGRMEYLLVMEYYPNGSLCKYLSLHTSDWVSSCRLAHSVTRGLAYLHTELPRGDHYKPAISHRDLNSRNVLVKNDGTCVISDFGLSMRLTGNRLVRPGEEDNAAISEVGTIRYMAPEVLEGAVNLRDCESALKQVDMYALGLIYWEIFMRCTDLFPGESVPEYQMAFQTEVGNHPTFEDMQVLVSREKQRPKFPEAWKENSLAVRSLKETIEDCWDQDAEARLTAQCAEERMAELMMIWERNKSVSPTVNPMSTAMQNERNLSHNRRVPKIGPYPDYSSSSYIEDSIHHTDSIVKNISSEHSMSSTPLTIGEKNRNSINYERQQAQARIPSPETSVTSLSTNTTTTNTTGLTPSTGMTTISEMPYPDETNLHTTNVAQSIGPTPVCLQLTEEDLETNKLDPKEVDKNLKESSDENLMEHSLKQFSGPDPLSSTSSSLLYPLIKLAVEATGQQDFTQTANGQACLIPDVLPTQIYPLPKQQNLPKRPTSLPLNTKNSTKEPRLKFGSKHKSNLKQVETGVAKMNTINAAEPHVVTVTMNGVAGRNHSVNSHAATTQYANGTVLSGQTTNIVTHRAQEMLQNQFIGEDTRLNINSSPDEHEPLLRREQQAGHDEGVLDRLVDRRERPLEGGRTNSNNNNSNPCSEQDVLAQGVPSTAADPGPSKPRRAQRPNSLDLSATNVLDGSSIQIGESTQDGKSGSGEKIKKRVKTPYSLKRWRPSTWVISTESLDCEVNNNGSNRAVHSKSSTAVYLAEGGTATTMVSKDIGMNCL

SEQ ID NO: 2370 - protein, 687 aa, Homo sapiens
MAAEVALSESAKDQKAANPYVTPNNRYGYQNGASYTWQFEARKAQILKCMECGSSHDTLQQLTAHMMVTGHFLKVTTSASKKGKQLVLDPVVEEKIQSIPLPPTTHTRLPASSIKKQPDSPAGSTTSEEKKEPEKEKPPVAGDAEKIKEESEDSLEKFEPSTLYPYLREEDLDDSPKGGLDILKSLENTVSTAISKAQNGAPSWGGYPSIHAAYQLPGTVKPLPAAVQSVQVQPSYAGGVKSLSSAEHNALLHSPGSLTPPPHKSNVSAMEELVEKVTGKVNIKKEERPPEKEKSSLAKAASPIAKENKDFPKTEEVSGKPQKKGPEAETGKAKKEGPLDVHTPNGTEPLKAKVTNGCNNLGIIMDHSPEPSFINPLSALQSIMNTHLGKVSKPVSPSLDPLAMLYKISNSMLDKPVYPATPVKQADAIDRYYYENSDQPIDLTKSKNKPLVSSVADSVASPLRESALMDISDMVKNLTGRLTPKSSTPSTVSEKSDADGSSFEEALDELSPVHKRKGRQSNWNPQHLLILQAQFASSLRETTEGKYIMSDLGPQERVHISKFTGLSMTTISHWLANVKYQLRRTGGTKFLKNLDTGHPVFFCNDCASQFRTASTYISHLETHLGFSLKDLSKLPLNQIQEQQNVSKVLTNKTLGPLGATEEDLGSTFQCKLCNRTFAKQARSQTAP

SEQ ID NO: 2371 - protein, 1333 aa, Homo sapiens [sequence omitted]

SEQ ID NO: 2372 - protein, 586 aa, Homo sapiens
MPKPINVRVTTMDAELEFAIQPNTTGKQLFDQVVKTIGLREVWYFGLHYVDNKGFPTWLKLDKKVSAQEVRKENPLQFKFRAKFYPEDVAEELIQDITQKLFFLQVKEGILSDEIYCPPETAVLLGSYAVQAKFGDYNKEVHKSGYLSSERLIPQRVMDQHKLTRDQWEDRIQVWHAEHRGMLKDNAMLEYLKIAQDLEMYGINYFEIKNKKGTDLWLGVDALGLNIYEKDDKLTPKIGFPWSEIRNISFNDKKFVIKPIDKKAPDFVFYAPRLRINKRILQLCMGNHELYMRRRKPDTIEVQQMKAQAREEKHQKQLERQQLETEKKRRETVEREKEQMMREKEELMLRLQDYEEKTKKAERELSEQIQRALQLEEERKRAQEEAERLEADRMAALRAKEELERQAVDQIKSQEQLAAELAEYTAKIALLEEARRRKEDEVEEWQHRAKEAQDDLVKTKEELHLVMTAPPPPPPPVYEPVSYHVQESLQDEGAEPTGYSAELSSEGIRDDRNEEKRITEAEKNERVQRQLLTLSSELSQARDENKRTHNDIIHNENMRQGRDKYKTLRQIRQGNTKQRIDEFEAL

SEQ ID NO: 2373 - protein, 237 aa, Homo sapiens
MAMFRSLVASAQQRQPPAGPAGGDSGLEAQYTCPICLEVYHRPVAIGSCGHTFCGECLQPCLQVPSPLCPLCRLPFDPKKVDKATHVEKQLSSYKAPCRGCNKKVTLAKMRVHISSCLKVQEQMANCPKFVPVVPTSQPIPSNIPNRSTFACPYCGARNLDQQELVKHCVESHRSDPNRVVCPICSAMPWGDPSYKSANFLQHLLHRHKFSYDTFVDYSIDEEAAFQAALALSLSEN

SEQ ID NO: 2374 - protein, 917 aa, Homo sapiens
MIASHLLAYFFTELNHDQVQKVDQYLYHMRLSDETLLEISKRFRKEMEKGLGATTHPTAAVKMLPTFVRSTPDGTEHGEFLALDLGGTNFRVLWVKVTDNGLQKVEMENQIYAIPEDIMRGSGTQLFDHIAECLANFMDKLQIKDKKLPLGFTFSFPCHQTKLDESFLVSWTKGFKSSGVEGRDVVALIRKAIQRRGDFDIDIVAVVNDTVGTMMTCGYDDHNCEIGLIVGTGSNACYMEEMRHIDMVEGDEGRMCINMEWGAFGDDGSLNDIRTEFDQEIDMGSLNPGKQLFEKMISGMYMGELVRLILVKMAKEELLFGGKLSPELLNTGRFETKDISDIEGEKDGIRKAREVLMRLGLDPTQEDCVATHRICQIVSTRSASLCAATLAAVLQRIKENKGEERLRSTIGVDGSVYKKHPHFAKRLHKTVRRLVPGCDVRFLRSEDGSGKGAAMVTAVAYRLADQHRARQKTLEHLQLSHDQLLEVKRRMKVEMERGLSKETHASAPVKMLPTYVCATPDGTEKGDFLALDLGGTNFRVLLVRVRNGKWGGVEMHNKIYAIPQEVMHGTGDELFDHIVQCIADFLEYMGMKGVSLPLGFTFSFPCQQNSLDESILLKWTKGFKASGCEGEDVVTLLKEAIHRREEFDLDVVAVVNDTVGTMMTCGFEDPHCEVGLIVGTGSNACYMEEMRNVELVEGEEGRMCVNMEWGAFGDNGCLDDFRTEFDVAVDELSLNPGKQRFEKMISGMYLGEIVRNILIDFTKRGLLFRGRISERLKTRGIFETKFLSQIESDCLALLQVRAILQHLGLESTCDDSIIVKEVCTVVARRAAQLCGAGMAAVVDRIRENRGLDALKVTVGVDGTLYKLHPHFAKVMHETVKDLAPKCDVSFLQSEDGSGKGAALITAVACRIREAGQR

SEQ ID NO: 2375 - protein, 115 aa, Homo sapiens
MPRRRRRRGSSGAGGRGRTCSRTVRAELSFSVSQVERSLREGHYAQRLSRTAPVYLAAVIEYLTAKVLELAGNEAQNSGERNITPLLLDMVVHNDRLLSTLFNTTTISQVAPGED

SEQ ID NO: 2376 - protein, 432 aa, Homo sapiens [sequence omitted]

SEQ ID NO: 2377 - protein, 213 aa, Homo sapiens
GTRLPAERLQLGDLPHGRSPAGQGNRRGGGLLVRPSPPNSGPLAAPGDHRVRPSPGRAQSWTPPPSVTACIFSPFPSQPAERRQPQSRCLHPLLMPAVFMLASSSALQCGRGVPRFPRTEVGAGHSVNEETKAEKVGNQTSVIPATSRQAALGTSWTQRRTQPLQERSHWHPRGNNASGMGGHRMFPGPLRGPAAQVLENECGSLGRAAEGRS

SEQ ID NO: 2378 - protein, 615 aa, Homo sapiens
MAVYVGMLRLGRLCAGSSGVLGARAALSRSWQEARLQGVRFLSSREVDRMVSTPIGGLSYVQGCTKKHLNSKTVVQCLETTAQRVPEREALVVLHEDVRLTFAQLKEEVDKAASGLLSIGLCKGDRLGMWGPNSYAWVLMQLATAQAGIILVSVNPAYQAMELEYVLKKVGCKALVFPKQFKTQQYYNVLKQICPEVENAQPGALKSQRLPDLTTVISVDAPLPGTLLLDEVVAAGSTRQHLDQLQYNQQFLSCHDPINIQFTSGTTGSPKGATLSHYNIVNNSNILGERLKLHEKTPEQLRMILPNPLYHCLGSVAGTMMCLMYGATLILASPIFNGKKALEAISRERGTFLYGTPTMFVDILNQPDFSSYDISTMCGGVIAGSPAPPELIRAIINKINMKDLVVAYGTTENSPVTFAHFPEDTVEQKAESVGRIMPHTEARIMNMEAGTLAKLNTPGELCIRGYCVMLGYWGEPQKTEEAVDQDKWYWTGDVATMNEQGFCKIVGRSKDMIIRGGENIYPAELEDFFHTHPKVQEVQVVGVKDDRMGEEICACIRLKDGEETTVEEIKAFCKGKISHFKIPKYIVFVTNYPLTISGKIQKFKLREQMERHLNL

SEQ ID NO: 2379 - protein, 393 aa, Homo sapiens
ARGEEEPVAPSTVAPRWLEEEAALQLALHRSLEPQGQVAEQEEAAALRQALTLSLLEQPPLEAEEPPDGGTDGKAQLVVHSAFEQDVEELDRALRAALEVHVQEETVGPWRRTLPAELRARLERCHGVSVALRGDCTILRGFGAHPARAARHLVALLAGPWDQSLAFPLAASGPTLAGQTPKGPWNNLERLAENTGEFQEVVRAFYDTLDAARSSIRVVRVERVSHPLLQQQYELYRERLLQRCERRPVEQVLYHGTTAPAVPDICAHGFNRSFCGRNATVYGKGVYFARRASLSVQDRYSPPNADGHKAVFVARVLTGDYGQGRRGLRAPPLRGPGHVLLRYDSAVDCICQPSIFVIFHDTQALPTHLITCEHVPRASPDDPSGLPGRSPDT

SEQ ID NO: 2380 - protein, 1348 aa, Homo sapiens
GAKDLVCSKMSRAKDAVSSGVASVVDVAKGVVQGGLDTTRSALTGTKEAVSSGVTGAMDMAKGAVQGGLDTSKAVLTGTKDTVSTGLTGAVNVAKGTVQAGVDTTKTVLTGTKDTVTTGVMGAVNLAKGTVQTGVETSKAVLTGTKDAVSTGLTGAVNVARGSIQTGVDTSKTVLTGTKDTVCSGVTSAMNVAKGTIQTGVDTSKTVLTGTKDTVCSGVTGAMNVAKGTIQTGVDTSKTVLTGTKDTVCSGVTGAMNVAKGTIQTGVDTTKTVLTGTKNTVCSGVTGAVNLAKEAIQGGLDTTKSMVMGTKDTMSTGLTGAANVAKGAMQTGLNTTQNIATGTKDTVCSGVTGAMNLARGTIQTGVDTTKIVLTGTKDTVCSGVTGAANVAKGAVQGGLDTTKSVLTGTKDAVSTGLTGAVNVAKGTVQTGVDTTKTVLTGTKDTVCSGVTSAVNVAKGAVQGGLDTTKSVVIGTKDTMSTGLTGAANVAKGAVQTGVDTAKTVLTGTKDTVTTGLVGAVNVAKGTVQTGMDTTKTVLTGTKDTIYSGVTSAVNVAKGAVQTGLKTTQNIATGTKNTFGSGVTGAVNVAKGAVQTGVDTAKTVLTGTKDTVTTGLMGAVNVAKGTVQTSVDTTKTVLTGTKDTVCSGVTGAANVAKGAVQTGVDTAKTVLTGTKDTVCSGVTGAVNVAKGAVQTGLKTTQNIATGTKNTLGSGVTGAANVAKGAVQGGLDTTKSVLTGTKDAVSTGLTGAVNLAKGTVQTGMDTTKTVLTGTKDAVCSGVTGAANVAKGAVQTGVDTAKTVLTGTKDTVTTGLMGAVNVAKGTVQTSVDTTKTVLTGTKDTVCSGVTGAANVAKGAVQGGLDTTKSVLTGTKDTVSTGLTGAVNLAKGTVQTGVDTSKTVLTGTKDTVCSGVTGAVNVAKGTVQTGVDTAKTVLSGAKDAVTTGVTGAVNVAKGTVQTGVDASKAVLMGTKDTVFSGVTGAMSMAKGAVQGGLDTTKTVLTGTKDAVSAGLMGSGNVATGATHTGLSTFQNWLPSTPATSWGGLTSSRTTDNGGEQTALSPQEAPFSGISTPPDVLSVGPEPAWEAAATTKGLATDVATFTQGAAPGREDTGLLTTTHGPEEAPRLAMLQNELEGLGDIFHPMNAEEQAQLAASQPGPKVLSAEQGSYFVRLGDLGPSFRQRAFEHAVSHLQHGQFQARDTLAQLQDCFRLIEKAQQAPEGQPRLDQGSGASAEDAAVQEERDAGVLSRVCGLLRQLHTAYSGLVSSLQGLPAELQQPVGRARHSLCELYGIVASAGSVEELPAERLVQSREGVHQAWQGLEQLLEGLQHNPPLSWLVGPFALPAGGQ

SEQ ID NO: 2381 - protein, 780 aa, Homo sapiens
KDASMTQALCRMIDWLSWPLAQHVDTWVIALLKGLAAVQKFTILIDVTLLKIELVFNRLWFPLVRPGALAVLSHMLLSFQHSPEAFHLIVPHVVNLVHSFKNDGLPSSTAFLVQLTELIHCMMYHYSGFPDLYEPILEAIKDFPKPSEEKIKLILNQSAWTSQSNSLASCLSRLSGKSETGKTGLINLGNTCYMNSVIQALFMATDFRRQVLSLNLNGCNSLMKKLQHLFAFLAHTQREAYAPRIFFEASRPPWFTPRSQQDCSEYLRFLLDRLHEEEKILKVQASHKPSEILECSETSLQEVASKAAVLTETPRTSDGEKTLIEKMFGGKLRTHIRCLNCRSTSQKVEAFTDLSLAFCPSSSLENMSVQDPASSPSIQDGGLMQASVPGPSEEPVVYNPTTAAFICDSLVNEKTIGSPPNEFYCSENTSVPNESNKILVNKDVPQKPGGETTPSVTDLLNYFLAPEILTGDNQYYCENCASLQNAEKTMQITEEPEYLILTLLRFSYDQKYHVRRKILDNVSLPLVLELPVKRITSFSSLSESWSVDVDFTDLSENLAKKLKPSGTDEASCTKLVPYLLSSVVVHSGISSESGHYYSYARNITSTDSSYQMYHQSEALALASSQSHLLGRDSPSAVFEQDLENKEMSKEWFLFNDSRVTFTSFQSVQKITSRFPKDTAYVLLYKKQHSTNGLSGNNPTSGLWINGDPPLQKELMDAITKDNKLYLQEQELNARARALQAASASCSFRPNGFDDNDPPGSCGPTGGGGGGGFNTVGRLVF

SEQ ID NO: 2382 - protein, 645 aa, Homo sapiens
SGVPVEETKKQKLSECSLTKGQDGLQNDFLSISEDVPRPPDTVSTGKGGKNSEAQLEDEEEEEEDGLSEECEEEESESFADMMKHGLTEADVGITKFVSSHQGFSGILKERYSDFVVHEIGKDGRISHLNDLSIPVDEEDPSEDIFTVLTAEEKQRLEELQLFKNKETSVAIEVIEDTKEKRTIIHQAIKSLFPGLETKTEDREGKKYIVAYHAAGKKALAKVRTAADPRKHSWPKSRGSYCHFVLYKENKDTMDAINVLSKYLRVKPNIFSYMGTKDKRAITVQEIAVLKITAQRLAHLNKCLMNFKLGNFSYQKNPLKLGELQGNHFTVVLRNITGTDDQVQQAMNSLKEIGFINYYGMQRFGTTAVPTYQVGRAILQNSWTEVMDLILKPRSGAEKGYLVKCREEWAKTKDPTAALRKLPVKRCVEGQLLRGLSKYGMKNIVSAFGIIPRNNRLMYIHSYQSYVWNNMVSKRIEDYGLKPVPGDLVLKGATATYIEEDDVNNYSIHDVVMPLPGFDVIYPKHKIQEAYREMLTADNLDIDNMRHKIRDYSLSGAYRKIIIRPQNVSWEVVAYDDPKIPLFNTDVDNLEGKTPPVFASEGKYRALKMDFSLPPSTYATMAIREVLKMDTSIKNQTQLNTTWLR

SEQ ID NO: 2383 - protein, 821 aa, Homo sapiens
AMLRLGLCAAALLCVCRPGAVRADCWLIEGDKGYVWLAICSQNQPPYETIPQHINSTVHDLRLNENKLKAVLYSSLNRFGNLTDLNLTKNEISYIEDGAFLGQSSLQVLQLGYNKLSNLTEGMLRGMSRLQFLFVQHNLIEVVTPTAFSECPSLISIDLSSNRLSRLDGATFASLASLMVCELAGNPFNCECDLFGFLAWLVVFNNVTKNYDRLQCESPREFAGYPLLVPRPYHSLNAIIVLQAKCRNGSLPARPVSHPTPYSTDAQREPDENSGFNPDEILSVEPPASSTTDASAGPAIKLHHVTFTSATLVVIIPHPYSKMYILVQYNNSYFSDVMTLKNKKEIVTLDKLRAHTEYTFCVTSLRNSRRFNHTCLTFTTRDPVPGDLAPSTSTTTHYIMTILGCLFGMVIVLGAVYYCLRKRRMQEEKQKSVNVKKTILEMRYGADVDAGSIVHAAQKLGEPPVLPVSRMASIPSMIGEKLPTAKGLEAGLDTPKVATKGNYIEVRTGAGGDGLARPEDDLPDLENGQGSAAEISTIAKEVDKVNQIINNCIDALKLDSASFLGGGSSSGDPELAFECQSLPAAAAASSATGPGALERPSFLSPSYKESSHHPLQRQLSADAAVTRKTCSVSSSGSIKSAKVFSLDVPDHPAATGLAKGDSKYIEKGSPLNSPLDRLPLVPAGSGGGSGGGGGIHHLEVKPAYHCSEHRHSFPALYYEEGADSLSQRVSFLKPLTRSKRDSTYSQLSPRHYYSGYSSSPEYSSESTHKIWERFRPYKKHHREEVYMAAGHALRKKVQFAKDEDLHDILDYWKGVSAQQKL

SEQ ID NO: 2384 - protein, 760 aa, Homo sapiens
LASGLLQCGGVREEGIHPHPPKPFSSPFLASDIGALNELELCLWRAGWSLLLCDEIGDELLALKMLLWILLLETSLCFAAGNVTGDVCKEKICSCNEIEGDLHVDCEKKGFTSLQRFTAPTSQFYHLFLHGNSLTRLFPNEFANFYNAVSLHMENNGLHEIVPGAFLGLQLVKRLHINNNKIKSFRKQTFLGLDDLEYLQADFNLLRDIDPGAFQDLNKLEVLILNDNLISTLPANVFQYVPITHLDLRGNRLKTLPYEEVLEQIPGIAEILLEDNPWDCTCDLLSLKEWLENIPKNALIGRVVCEAPTRLQGKDLNETTEQDLCPLKNRVDSSLPAPPAQEETFAPGPLPTPFKTNGQEDHATPGSAPNGGTKIPGNWQIKIRPTAAIATGSSRNKPLANSLPCPGGCSCDHIPGSGLKMNCNNRNVSSLADLKPKLSNVQELFLRDNKIHSIRKSHFVDYKNLILLDLGNNNIATVENNTFKNLLDLRWLYMDSNYLDTLSREKFAGLQNLEYLNVEYNAIQLILPGTFNAMPKLRILILNNNLLRSLPVDVFAGVSLSKLSLHNNYFMYLPVAGVLDQLTSIIQIDLHGNPWECSCTIVPFKQWAERLGSEVLMSDLKCETPVNFFRKDFMLLSNDEICPQLYARISPTLTSHSKNSTGLAETGTHSNSYLDTSRVSISVLVPGLLLVFVTSAFTVVGMLVFILRNRKRSKRRDANSSASEINSLQTVCDSSYWHNGPYNADGAHRVYDCGSHSLSD

SEQ ID NO: 2385 - protein, 452 aa, Homo sapiens
KVGAMALTLLEDWCKGMDMDPRKALLIVGIPMECSEVEIQDTVKAGLQPLCAYRVLGRMFRREDNAKAVFIELADTVNYTTLPSHIPGKGGSWEVVVKPRNPDDEFLSRLNYFLKDEGRSMTDVARALGCCSLPAESLDAEVMPQVRSPPLEPPKESMWYRKLKVFSGTASPSPGEETFEDWLEQVTEIMPIWQVSEVEKRRRLLESLRGPALSIMRVLQANNDSITVEQCLDALKQIFGDKEDFRASQFRFLQTSPKIGEKVSTFLLRLEPLLQKAVHKSPLSVRSTDMIRLKHLLARVAMTPALRGKLELLDQRGCPPNFLELMKLIRDEEEWENTEAVMKNKEKPSGRGRGASGRQARAEASVSAPQATVQARSFSDSSPQTIQGGLPPLVKRRRLLGSESTRGEDHGQATYPKAENQTPGREGPQAAGEELGNEAGAGAMSHPKPWET

SEQ ID NO: 2386 - protein, 704 aa, Homo sapiens
VLGGLLLLGVAQLGLFLEEKLREHLAEKEKLNEERLEQEEKLKAKIRQLTEEKAALEEYITQERNRAKETLEEERKRMQELESLLAQQKKALAKSITQEKNRVKEALEEEQTRVQELEERLARQKEISESNIAYEKRKAKEAMEKEKKKVQDLENRLTKQKEELELKEQKEDVLNNKLSDALAMVEETQKTKATESLKAESLALKLNETLAELETTKTKMIMVEERLILQQKMVKALQDEQESQRHGFGEEIMEYKEQIKQHAQTIVSLEEKLQKVTQHHKKIEGEIATLKDNDPAPKEERPQDPLVAPMTESSAKDMAYEHLIDDLLAAQKEILSQQEVIMKLRKDLTEAHSRMSDLRGELNEKQKMELEQNVVLVQQQSKELSVLKEKMAQMSSLVEKKDRELKALEEALRASQEKHRLQLNTEKEQKPRKKTQTCDTSVQIEPVHTEAFSSSQEQQSFSDLGVRCKGSRHEEVIQRQKKALSELRARIKELEKARSPDHKDHQNESFLDLKNLRMENNVQKILLDAKPDLPTLSRIEILAPQNGLCNARFGSAMEKSGKMDVAEALELSEKLYLDMSKTLGSLMNIKNMSGHVSMKYLSRQEREKVNQLRQRDLDLVFDKITQLKNQLGRKEELLRGYEKDVEQLRRSKVSIEMYQSQVAKLEDDIYKEAEEKALLKEALERMEHQLCQEKRINRAIRQQK

SEQ ID NO: 2387 - protein, 78 aa, Homo sapiens
MPEPAKSAPAPKKGSKKAVTKAQKKDGKKRKRSRKESYSIYVYKVLKQVHPDTGISSKAMGIMNSFVNDIFERIAGLP

SEQ ID NO: 2388 - protein, 360 aa, Homo sapiens
MGFELDRFDGDVDPDLKCALCHKVLEDPLTTPCGHVFCAGCVLPWVVQEGSCPARCRGRLSAKELNHVLPLKRLILKLDIKCAYATRGCGRVVKLQQLPEHLERCDFAPARCRHAGCGQVLLRRDVEAHMRDACDARPVGRCQEGCGLPLTHGEQRAGGHCCARALRAHNGALQARLGALHKALKKEALRAGKREKSLVAQLAAAQLELQMTALRYQKKFTEYSARLDSLSRCVAAPPGGKGEETKSLTLVLHRDSGSLGFNIIGGRPSVDNHDGSSSEGIFVSKIVDSGPAAKEGGLQIHDRIIEMRKLELRTVKLPKAHSQDSNAGFIPQLLSLHTPPLSCEKGGGHLACGGAYLNCI

SEQ ID NO: 2389 - protein, 971 aa, Homo sapiens
MGSFLSKLELSPSSPAQVRTDLPERPTKRRPPQPLHQVHRVQFVHRAHPAPRYRPVRRRPNLDPANPTTWLANEAWRRFPMKKSQNSPLGPLPSDWWESYLKRTIWSLRHPRPIWSPVTIRITPPDQRVPPSTSPEDVIALAGLPPSEELADPCSKETVLRALRECRKGKGRLEEPLFPESLDSKRRSPETRPSAFKPLMKNGTLTSFVPRPGPLKRSLHSWGSDHSLTKRPNCSSMSSLASIYRGGTLSSKRNAIGSSYSSCRNFSDPWKRSVPSVSFETPEWPIKKEKSCHRPSSPVPLVSDFESLGGSESSGQQNQKIPQLPSSPENLVSEIPPPQLGYAVSDENLTLGKKAELQSTGEATSVAHSPLKTPSLPTPPGCSQSELLPGTSPDSKPTATFILLTPTSPTLPVTDTTWPPSTSQADRSPMPPDPPAPPTIQSTLLGMVSSPTSHLSASAPPDATSAHLMLKPILGPLHNSEIGSSSYSRISVTAAASSISSLSTIQGTLTPTFKPIFGSIDPLKTTPMIAPFSSKQTPPPFTHASTHHFHGLVKATSVVMSTTLASTSKDSVFKPPLDFGVVNVTSAVGNTYSVPSTCDTFLLGTAQAFRADFTPATGFIFPPHHHPTIPTVHTVTMFTQVLSSVVQISPRSSTANFRGMGSPLPASALVSTNWLASTPSISNLTPAITSPLGSSSRPPFPLSQGANPQPAFGATNGQKQGPSQPALMPSVSSSFLFGSSAVALPTPMPTPAQPAFISTTQSALGCLTPSASTSQTPASTWSGIGGIPAGFPISQASTTGFRIVIQTHQSGAFGSVFGSRAPQPFTFGGFVTPMDCDESGIIMTGPDMSPTSGAFSIGALPSGTTNTMIPFGKGWSQNTEGLPSHRTAFSLGRGSISARKTMAPIAQNTPVPGQAKAGSSVGFGMPFPPAQGSVGRGPFRSSASSFSIGAKSKTPKNREKGHSRRHHAYKK

SEQ ID NO: 2390 - protein, 475 aa, Homo sapiens
MTTILTYPFKNLPTASKWALRFSIRPLSCSSQLRAAPAVQTKTKKTLAKPNIRNVVVVDGVRTPFLLSGTSYKDLMPHDLARAALTGLLHRTSVPKEVVDYIIFGTVIQEVKTSNVAREAALGAGFSDKTPAHTVTMACISANQAMTTGVGLIASGQCDVIVAGGVELMSDVPIRHSRKMRKLMLDLNKAKSMGQRLSLISKFRFNFLASELPAVSEFSTSETMGHSADRLAAAFAVSRLEQDEYALRSHSLAKKAQDEGLLSDVVPFKVPGKDTVTKDNGIRPSSLEQMAKLKPAFIKPYGTVTAANSSFLTDGASAMLIMAEEKALAMGYKPKAYLRDFMYVSQDPKDQLLLGPTYATPKVLEKAGLTMNDIDAFEFHEAFSGQILANFKAMDSDWFAENYMGRKTKVGLPPLEKFNNWGGSLSLGHPFGATGCRLVMAAANRLRKEGGQYGLVAACAAGGQGHAMIVEAYPK

SEQ ID NO: 2391 - protein, 361 aa, Homo sapiens
MATLARLQARSSTVGNQYYFRNSVVDPFRKKENDAAVKIQSWFRGCQVRAYIRHLNRIVTIIQKWWRSFLGRKQYQLTVQVAYYTMMMNLYNAMAVRIQRRWRGYRVRKYLFNYYYLKEYLKVVSETNDAIRKALEEFAEMKEREEKKANLEREEKKRDYQARKMHYLLSTKQIPGIYNSPFRKEPDPWELQLQKAKPLTHRRPKVKQKDSTSLTDWLACTSARSFPRSEILPPINRKQCQGPFRDITEVLEQRYRPLEPTLRVAEPIDELKLAREELRREEWLQNVNDNMFLPFSSYHKNEKYIPSMHLSSKYGPISYKEQFRSENPKKWICDKDFQTVLPSFELFSKYGKLYSKAGQIV

SEQ ID NO: 2392 - protein, 355 aa, Homo sapiens [sequence omitted]

SEQ ID NO: 2393 - protein, 780 aa, Homo sapiens
MTAAAASNWGLITNIVNSIVGVSVLTMPFCFKQCGIVLGALLLVFCSWMTHQSCMFLVKSASLSKRRTYAGLAFHAYGKAGKMLVETSMIGLMLGTCIAFYVVIGDLGSNFFARLFGFQVGGTFRMFLLFAVSLCIVLPLSLQRNMMASIQSFSAMALLFYTVFMFVIVLSSLKHGLFSGQWLRRVSYVRWEGVFRCIPIFGMSFACQSQVLPTYDSLDEPSVKTMSSIFASSLNVVTTFYVMVGFFGYVSFTEATAGNVLMHFPSNLVTEMLRVGFMMSVAVGFPMMILPCRQALSTLLCEQQQKDGTFAAGGYMPPLRFKALTLSVVFGTMVGGILIPNVETILGLTGATMGSLICFICPALIYKKIHKNALSSQVVLWVGLGVLVVSTVTTLSVSEEVPEDLAEEAPGGRLGEAEGLMKVEAARLSAQDPVVAVAEDGREKPKLPKEREELEQAQIKGPVDVPGREDGKEAPEEAQLDRPGQGIAVPVGEAHRHEPPVPHDKVVVDEGQDREVPEENKPPSRHAGGKAPGVQGQMAPPLPDSEREKQEPEQGEVGKRPGQAQALEEAGDLPEDPQKVPEADGQPAVQPAKEDLGPGDRGLHPRPQAVLSEQQNGLAVGGGEKAKGGPPPGNAAGDTGQPAEDSDHGGKPPLPAEKPAPGPGLPPEPREQRDVERAGGNQAASQLEGKASALQPPASGPGSGSPLPQPWGDAQVILGSPARPPFSFQPPAEQTPRRAFCSLPISSLLSGNLLSALLPFKHLRHRHMACDYRFISLAPL

SEQ ID NO: 2394 - protein, 81 aa, Homo sapiens
MSNRLLCCVIICLLRAGLKDAVVTQFPRHRIIGTGKEFILLCPQNMNHVAMYWYRQNPGLGLKLVYYSPGTGSIEKGDVSE

SEQ ID NO: 2395 - protein, 188 aa, Homo sapiens
FTTGCHYWEVYVGDKTKWILGVCSESVSRKGKVTASPANGHWLLRQSRGNEYEALTSPQTSFRLKEPPRCVGIFLDYEAGVISFYNVTNKSHIFTFTHNFSGPLRPFFEPCLHDGGKNTAPLVICSELHKSEESIVPRPEGKGHANGDVSLKVNSSLLPPKAPELKDIILSLPPDLGPALQELKAPSF

SEQ ID NO: 2396 - protein, 88 aa, Homo sapiens
MASVVPVKDKKLLEVKLGELPSWILMRDFSPSGIFGAFQRGYYRYYNKYINVKKGSISGITMVLACYVLFSYSFSYKHLKHERLRKYH

SEQ ID NO: 2397 - protein, 161 aa, Homo sapiens
APIKVGDAIPAVEVFEGEPGNKVNLAELFKGKKGVLFGVPGAFTPGCSKTHLPGFVEQAEALKAKGVQVVACLSVNDAFVTGEWGRAHKAEGKVRLLADPTGAFGKETDLLLDDSLVSIFGNRRLKRFSMVVQDGIVKALNVEPDGTGLTCSLAPNIISQL

SEQ ID NO: 2398 - protein, 298 aa, Homo sapiens
MTEQAISFAKDFLAGGIAAAISKTAVAPIERVKLLLQVQHASKQIAADKQYKGIVDCIVRIPKEQGVLSFWRGNLANVIRYFPTQALNFAFKDKYKQIFLGGVDKHTQFWRYFAGNLASGGAAGATSLCFVYPLDFARTRLAADVGKSGTEREFRGLGDCLVKITKSDGIRGLYQGFSVSVQGIIIYRAAYFGVYDTAKGMLPDPKNTHIVVSWMIAQTVTAVAGVVSYPFDTVRRRMMMQFGRKGADIMYTGTVDCWRKIFRDEGGKAFFKGAWSNVLRGMGGAFVLVLYDELKKVI

SEQ ID NO: 2399 - protein, 631 aa, Homo sapiens
MAAHLVKRCTCLLREAARQAPAMAPVGRLRLAWVAHKTLTSSATSPISHLPGSLMEPVEKERASTPYIEKQVDHLIKKATRPEELLELLGGSHDLDSNQAAMVLIRLSHLLSEKPEDKGLLIQDAHFHQLLCLLNSQIASVWHGTLSKLLGSLYALGIPKASKELQSVEQEVRWRMRKLKYKHLAFLAESCATLSQEQHSQELLAELLTHLERRWTEIEDSHTLVTVMMKVGHLSEPLMNRLEDKCLELVEHFGPNELRKVLVMLAAQSRRSVPLLRAISYHLVQKPFSLTKDVLLDVAYAYGKLSFHQTQVSQRLATDLLSLMPSLTSGEVAHCAKSFALLKWLSLPLFEAFAQHVLNRAQDITLPHLCSVLLAFARLNFHPDQEDQFFSLVHEKLGSELPGLEPALQVDLVWALCVLQQAREAELQAVLHPEFHIQFLGGKSQKDQNTFQKLLHINATALLEYPEYSGPLLPASAVAPGPSALDRKVTPLQKELQETLKGLLGSADKGSLEVATQYGWVLDAEVLLDSDGEFLPVRDFVAPHLAQPTGSQSPPPGSKRLAFLRWEFPNFNSRSKDLLGRFVLARRHIVAAGFLIVDVPFYEWLELKSEWQKGAYLKDKMRKAVAEELAK

SEQ ID NO: 2400 - protein, 454 aa, Homo sapiens
MAEFSQKRGKRRSDEGLGSMVDFLLANARLVLGVGGAAVLGIATLAVKRFIDRATSPRDEDDTKADSWKELSLLKATPHLQPRPPPAALSQPVLPLAPSSSAPEGPAETDPEVTPQLSSPAPLCLTLQERLLAFERDRVTIPAAQVALAKQLAGDIALELQAYFRSKFPELPFGAFVPGGPLYDGLQAGAADHVRLLVPLVLEPGLWSLVPGVDTVARDPRCWAVRRTQLEFCPRGSSPWDRFLVGGYLSSRVLLELLRKALAASVNWPAIGSLLGCLIRPSMASEELLLEVQHERLELTVAVLVAVPGVDADDRLLLAWPLEGLAGNLWLQDLYPVEAARLRALDDHDAGTRRRLLLLLCAVCRGCSALGQLGRGHLTQVVLRLGEDNVDWTEEALGERFLQALELLIGSLEQASLPCHFNPSVNLFSSLREEEIDDIGYALYSGLQEPEGLL

SEQ ID NO: 2401 - protein, 303 aa, Homo sapiens [sequence omitted]

SEQ ID NO: 2402 - protein, 260 aa, Homo sapiens
MNNLNDPPNWNIRPNSRADGGDGSRWNYALLVPMLGLAAFRWIWSRESQKEVEKEREAYRRRTAAFQQDLEAKYHAMISENRRAVAQLSLELEKEQNRTASYREALISQGRKLVEEKKLLEQERAQVMQEKRQVQPLRSAYLSCLQREENWQRRARLLLKEFEAVLTERQNIYCSLFLPRSKRLEIEKSLLVRASVDPVAADLEMAAGLTDIFQHDTYCGDVWNTNKRQNGRLMWLYLKYWELVVELKKFKRVEEAILEK

SEQ ID NO: 2403 - protein, 492 aa, Homo sapiens
PRVRPRVRPRVRHQGTGAGISPVILNSGEGKEVDILRMLIKAKDEYTKCKTCSEPKKITSSSAIYDNPNLIKPIPVKPSENQQQRIPQPNQTLDPEPQHLSLTALFGKQDKATCQETVEPPQTLHQQQQQQQQQQQEKLPIRQGVVRSLSYEEPRRHSPPIEKQLCPAIQKLMVRSADLHPLSELPENRPCENGSTHSAGEFFTGPVQPGSPHNIGTSRGVQNASRTQNLFEKLQSTPGAANKCDPSTPAPASSAALNRSRAPTSVTPVAPGKGLAQPPQAYFNGSLPPQTVGHQAHGREQSTLPRQTLPISGSQTGSSGVISPQELLKKLQIVQQEQQLHASNRPALAAKFPVLAQSSGTGKPLESWINKTPNTEQQTPLFQVISPQRIPATAAPSLLMSPMVFAQPTSVPPKERESGLLPVGGQEPPAAATSLLLPIQSPEPSVITSSPLTKLQLQEALLYLIQNDDNFLNIIYEAYLFSMTQAAMKKTM

SEQ ID NO: 2404 - protein, 59 aa, Homo sapiens
GRIAFTDADDVAILTYVKENARSPSSVTGNALWKAMEKSSLTQHSWQSLKDRYLKHLRG

SEQ ID NO: 2405 - protein, 130 aa, Homo sapiens
KVFERCELARTLKRLGMDGYRGISLANWMCLAKWESGYNTRATNYNAGDRSTDYGIFQINSRYWCNDGKTPGAVNACHLSCSALLQDNIADAVACAKRVVRDPQGIRAWVAWRNRCQNRDVRQYVQGCGV

SEQ ID NO: 2406 - protein, 250 aa, Homo sapiens
MNDLRVPFIRDNLLETIPNHQPGKPLLGMKILDVGCGGGLLTEPLGRLGASVIGIDPVDENIKTAQCHKSFDPVLDKRIEYRVCSLEEIVEETAETFDAVVASEVVEHVIDLETFLQCCCQVLKPGGSLFITTINKTQLSYALGIVFSEQIAGIVPKGTHTWEKFVSPETLESILESNGLSVQTVVGMLYNPFSGYWHWSENTSLNYAAHAVKSRVQEHPASAEFVLKGETEELQANACTNPAVHEKLKK

SEQ ID NO: 2407 - protein, 916 aa, Homo sapiens
MDCEHSLSLPCRGAEAWEIGIDKYLYAMRLSDETLIDIMTRFRKEMKNGLSRDFNPTATVKMLPTFVRSIPDGSEKGDFIALDLGGSSFRILRVQVNHEKNQNVHMESEVYDTPENIVHGSGSQLFDHVAECLGDFMEKRKIKDKKLPVGFTFSFPCQQSKIDEAILITWTKRFKASGVEGADVVKLLNKAIKKRGDYDANIVAVVNDTVGTMMTCGYDDQHCEVGLIIGTGTNACYMEELRHIDLVEGDEGRMCINTEWGAFGDDGSLEDIRTEFDREIDRGSLNPGKQLFEKMVSGMYLGELVRLILVKMAKEGLLFEGRITPELLTRGKFNTSDVSAIEKNKEGLHNAKEILTRLGVEPSDDDCVSVQHVCTIVSFRSANLVAATLGAILNRLRDNKGTPRLRTTVGVDGSLYKTHPQYSRRFHKTLRRLVPDSDVRFLLSESGSGKGAAMVTAVAYRLAEQHRQIEETLAHFHLTKDMLLEVKKRMRAEMELGLRKQTHNNAVVKMLPSFVRRTPDGTENGDFLALDLGGTNFRVLLVKIRSGKKRTVEMHNKIYAIPIEIMQGTGEELFDHIVSCISDFLDYMGIKGPRMPLGFTFSFPCQQTSLDAGILITWTKGFKATDCVGHDVVTLLRDAIKRREEFDLDVVAVVNDTVGTMMTCAYEEPTCEVGLIVGTGSNACYMEEMKNVEMVEGDQGQMCINMEWGAFGDNGCLDDIRTHYDRLVDEYSLNAGKQRYEKMISGMYLGEIVRNILIDFTKKGFLFRGQISETLKTRGIFETKFLSQIESDRLALLQVRAILQQLGLNSTCDDSILVKTVCGVVSRRAAQLCGAGMAAVVDKIRENRGLDRLNVTVGVDGTLYKLHPHFSRIMHQTVKELSPKCNVSFLLSEDGSGKGAALITAVGVRLRTEASS

SEQ ID NO: 2408 - protein, 921 aa, Homo sapiens
MGQICQRESATAAEKPKLHLLAESEIDKYLYAMRLSDETLIDIMTRFRKEMKNGLSRDFNPTATVKMLPTFVRSIPDGSEKGDFIALDLGGSSFRILRVQVNHEKNQNVHMESEVYDTPENIVHGSGSQLFDHVAECLGDFMEKRKIKDKKLPVGFTFSFPCQQSKIDEAILITWTKRFKASGVEGADVVKLLNKAIKKRGDYDANIVAVVNDTVGTMMTCGYDDQHCEVGLIIGTGTNACYMEELRHIDLVEGDEGRMCINTEWGAFGDDGSLEDIRTEFDREIDRGSLNPGKQLFEKMVSGMYLGELVRLILVKMAKEGLLFEGRITPELLTRGKFNTSDVSAIEKNKEGLHNAKEILTRLGVEPSDDDCVSVQHVCTIVSFRSANLVAATLGAILNRLRDNKGTPRLRTTVGVDGSLYKTHPQYSRRFHKTLRRLVPDSDVRFLLSESGSGKGAAMVTAVAYRLAEQHRQIEETLAHFHLTKDMLLEVKKRMRAEMELGLRKQTHNNAVVKMLPSFVRRTPDGTENGDFLALDLGGTNFRVLLVKIRSGKKRTVEMHNKIYAIPIEIMQGTGEELFDHIVSCISDFLDYMGIKGPRMPLGFTFSFPCQQTSLDAGILITWTKGFKATDCVGHDVVTLLRDAIKRREEFDLDVVAVVNDTVGTMMTCAYEEPTCEVGLIVGTGSNACYMEEMKNVEMVEGDQGQMCINMEWGAFGDNGCLDDIRTHYDRLVDEYSLNAGKQRYEKMISGMYLGEIVRNILIDFTKKGFLFRGQISETLKTRGIFETKFLSQIESDRLALLQVRAILQQLGLNSTCDDSILVKTVCGVVSRRAAQLCGAGMAAVVDKIRENRGLDRLNVTVGVDGTLYKLHPHFSRIMHQTVKELSPKCNVSFLLSEDGSGKGAALITAVGVRLRTEASS

SEQ ID NO: 2409 - protein, 230 aa, Homo sapiens
MLARAPSSSSSSRCWATRLRPCRSPREGTPRASAVWPAVTPASRGAAPGTSPRRPSVVPCRTGPHSLWVPATACSCPQAACWYPPTPTAWTAESVLARSAGPALTPSPSTAMTTAAPGAVEASCPTCAQASASWRRWTVGRPAASSTAMPGAHWAAVCRRSALTRAPPSCPQSAWLPCPRLPGAARAASWASQPPPPTGHGMTVGQWAPGVPSSLHSSVLESTNPQRRLL

SEQ ID NO: 2410 - protein, 639 aa, Homo sapiens
MLLWLLLLILTPGREQSGVAPKAVLLLNPPWSTAFKGEKVALICSSISHSLAQGDTYWYHDEKLLKIKHDKIQITEPGNYQCKTRGSSLSDAVHVEFSPDWLILQALHPVFEGDNVILRCQGKDNKNTHQKVYYKDGKQLPNSYNLEKITVNSVSRDNSKYHCTAYRKFYILDIEVTSKPLNIQVQGVPVSNVNLEIRPTGGQLIEGENMVLICSVAQGSGTVTFSWHKEGRVRSLGRKTQRSLLAELHVLTVKESDAGRYYCAADNVHSPILSTWIRVTVRIPVSHPVLTFRAPRAHTVVGDLLELHCESLRGSPPILYRFYHEDVTLGNSSAPSGGGASFNLSLTAEHSGNYSCDADNGLGAQHSHGVSLRVTVPVSRPVLTLRAPGAQAVVGDLLELHCESLRGSFPILYWFYHEDDTLGNISAHSGGGASFNLSLTTEHSGNYSCEADNGLGAQHSKVVTLNVTGTSRNRTGLTAAGITGLVLSILVLAAAAALLHYARARRKPGGLSATGTSSHSPSECQEPSSSRPSRIDPQEPTHSKPLAPMELEPMYSNVNPGDSNPIYSQIWSIQHTKENSANCPMMHQEHEELTVLYSELKKTHPDDSAGEASSRGRAHEEDDEENYENVPRVLLASDH

SEQ ID NO: 2411 - protein, 369 aa, Homo sapiens
MYAMKYMNKQQCIERDEVRNVFRELEILQEIEHVFLVNLWYSFQDEEDMFMVVDLLLGGDLRYHLQQNVQFSEDTVRLYICEMALALDYLRGQHIIHRDVKPDNILLDERGHAHLTDFNIATIIKDGERATALAGTKPYMAPEIFHSFVNGGTGYSFEVDWWSVGVMAYELLRGWRPYDIHSSNAVESLVQLFSTVSVQYVPTWSKEMVALLRKLLTVNPEHRLSSLQDVQAAPALAGVLWDHLSEKRVEPGFVPNKGRLHCDPTFELEEMILESRPLHKKKKRLAKNKSRDNSRDSSQSENDYLQDCLDAIQQDFVIFNREKLKRSQDLPREPLPAPESRDAAEPVEDEAERSALPMCGPICPSAGSG

SEQ ID NO: 2412 - protein, 1000 aa, Homo sapiens
MAERKPNGGSGGASTSSSGTNLLFSSSATEFSFNVPFIPVTQASASPASLLLPGEDSTDVGEEDSFLGQTSIHTSAPQTFSYFSQVSSSSDPFGNIGQSPLTTAATSVGQSGFPKPLTALPFTTGSQDVSNAFSPSISKAQPGAPPSSLMGINSYLPSQPSSLPPSYFGNQPQGIPQPGYNPYRHTPGSSRANPYIAPPQLQQCQTPGPPAHPPPSGPPVQMYQMPPGSLPPVPSSVQSPAQQQVPARPGAPSVQVPSPFLLQNQYEPVQPHWFYCKEVEYKQLWMPFSVFDSLNLEEIYNSVQPDPESVVLGTDGGRYDVYLYDRIRKAAYWEEEPAEVRRCTWFYKGDTDSRFIPYTEEFSEKLEAEYKKAVTTNQWHRRLEFPSGETIVMHNPKVIVQFQPSSVPDEWGTTQDGQTRPRVVKRGIDDNLDEIPDGEMPQVDHLVFVVHGIGPVCDLRFRSIIECVDDFRVVSLKLLRTHFKKSLDDGKVSRVEFLPVHWHSSLGGDATGVDRNIKKITLPSIGRFRHFTNETLLDILFYNSPTYCQTIVEKVGMEINHLHALFMSRNPDFKGGVSVAGHSLGSLILFDILSNQKDLNLSKCPGPLAVANGVVKQLHFQEKQMPEEPKLTLDESYDLVVENEEVLTLQETLEALSLSEYFSTFEKEKIDMESLLMCTVDDLKEMGIPLGPRKKIANFVEHKAAKLKKAASEKKAVAATSTKGQEQSAQKTKDMASLPSESNEPKRKLPVGACVSSVCVNYESFEVGAGQVSVAYNSLDFEPEIFFALGSPIAMFLTIRGVDRIDENYSLPTCKGFFNIYHPLDPVAYRLEPMIVPDLDLKAVLIPHHKGRKRLHLELKESLSRMGSDLKQGFISSLKSAWQTLNEFARAHTSSTQLQEELEKVANQIKEEEEKQVVEAEKVVESPDFSKDEDYLGKVGMLNGGRRIDYVLQEKPIESFNEYLFALQSHLCYWESEDTALLLLKEIYRTMNISPEQPQH

SEQ ID NO: 2413 - protein, 115 aa, Homo sapiens
MTKKRRNNGRAKKGRGLVQPIRCTNCARCVPKDKAIKKFVIRNIVEAAAVRDMSEASVFDAYVLPKLYVKLHYCLSCAVHSKVVRNRSREARKDRTPPPRFRTAGAAPCPLPKPM

SEQ ID NO: 2414 - protein, 664 aa, Homo sapiens
MSGVRGLSRLLSARRLALAKAWPTVLQTGTRGFHFTVDGNKRASAKVSDSISAQYPVVDHEFDAVVVGAGGAGLRAAFGLSEAGFNTACVTKLFPTRSHTVAAQGGINAALGNMEEDNWRWHFYDTVKGSDWLGDQDAIHYMTEQAPAAVVELENYGMPFSRTEDGKIYQRAFGGQSLKFGKGGQAHRCCCVADRTGHSLLHTLYGRSLRYDTSYFVEYFALDLLMENGECRGVIALCIEDGSIHRIRAKNTVVATGGYGRTYFSCTSAHTSTGDGTAMITRAGLPCQDLEFVQFHPTGIYGAGCLITEGCRGEGGILINSQGERFMERYAPVAKDLASRDVVSRSMTLEIREGRGCGPEKDHVYLQLHHLPPEQLATRLPGISETAMIFAGVDVTKEPIPVLPTVHYNMGGIPTNYKGQVLRHVNGQDQIVPGLYACGEAACASVHGANRLGANSLLDLVVFGRACALSIEESCRPGDKVPPIKPNAGEESVMNLDKLRFADGSIRTSELRLSMQKSMQNHAAVFRVGSVLQEGCGKISKLYGDLKHLKTFDRGMVWNTDLVETLELQNLMLCALQTIYGAEARKESRGAHAREDYKVRIDEYDYSKPIQGQQKKPFEEHWRKHTLSYVDVGTGKVTLEYRPVIDKTLNEADCATVPPAIRSY

SEQ ID NO: 2415 - protein, 170 aa, Homo sapiens [sequence omitted]

SEQ ID NO: 2416 - protein, 180 aa, Homo sapiens
MVCLFNKLYQKLNLKKLWQNLTLCSKKDMKNFFDKLQQHSIPVFIFSAGISDVLEEVIRQAGVYHPNVKVVSNFMDFDETGVLKGFKGVLIHIFNKHDGALRNTEYFNQLKDNSNIILLGDSQGDLRMADGVANVEHILKVGYLNDRVDELLEKYMDSYDIVLVQDESLEVANSILQKIL

SEQ ID NO: 2417 - protein, 351 aa, Homo sapiens
MAAAPLKVCIVGSGNWGSAVAKIIGNNVKKLQKFASTVKMWVFEETVNGRKLTDIINNDHENVKYLPGHKLPENVVAMSNLSEAVQDADLLVFVIPHQFIHRICDEITGRVPKKALGITLIKGIDEGPEGLKLISDIIREKMGIDISVLMGANIANEVAAEKFCETTIGSKVMENGLLFKELLQTPNFRITVVDDADTVELCGALKNIVAVGAGFCDGLRCGDNTKAAVIRLGLMEMIAFARIFCKGQVSTATFLESCGVADLITTCYGGRNRRGAEAFARTGKTIEELEKEMLNGQKLQGPQTSAEVYRILKQKGLLDKFPLFTAVYQICYESRPVQEMLSCLQSHPEHT

SEQ ID NO: 2418 - protein, 1313 aa, Homo sapiens
MLYNKVCDIVSSLSELLEIQLLTDTTILQVSSMGITPFFVENVSELQLCAIKLVTAVFSRYEKHRQLILEEIFTSLARLPTSKRSLRNFRLNSSDMDGEPMYIQMVTALVLQLIQCVVHLPSSEKDSNAEEDSNKKIDQDVVITNSYETAMRTAQNFLSIFLKKCGSKQGEEDYRPLFENFVQDLLSTVNKPEWPAAELLLSLLGRLLVHQFSNKSTEMALRVASLDYLGTVAARLRKDAVTSKMDQGSIERILKQVSGGEDEIQQLQKALLDYLDENTETDPSLVFSRKFYIAQWFRDTTLETEKAMKSQKDEESSEGTHHAKEIETTGQIMHRAENRKKFLRSIIKTTPSQFSTLKMNSDTVDYDDACLIVRYLASMRPFAQSFDIYLTQILRVLGENAIAVRTKAMKCLSEVVAVDPSILARLDMQRGVHGRLMDNSTSVREAAVELLGRFVLCRPQLAEQYYDMLIERILDTGISVRKRVIKILRDICIEQPTFPKITEMCVKMIRRVNDEEGIKKLVNETFQKLWFTPTPHNDKEAMTRKILNITDVVAACRDTGYDWFEQLLQNLLKSEEDSSYKPVKKACTQLVDNLVEHILKYEESLADSDNKGVNSGRLVACITTLFLFSKIRPQLMVKHAMTMQPYLTTKCSTQNDFMVICNVAKILELVVPLMEHPSETFLATIEEDLMKLIIKYGMTVVQHCVSCLGAVVNKVTQNFKFVWACFNRYYGAISKLKSQHQEDPNNTSLLTNKPALLRSLFTVGALCRHFDFDLEDFKGNSKVNIKDKVLELLMYFTKHSDEEVQTKAIIGLGFAFIQHPSLMFEQEVKNLYNNILSDKNSSVNLKIQVLKNLQTYLQEEDTRMQQADRDWKKVAKQEDLKEMGDVSSGMSSSIMQLYLKQVLEAFFHTQSSVRHFALNVIALTLNQGLIHPVQCVPYLIAMGTDPEPAMRNKADQQLVEIDKKYAGFIHMKAVAGMKMSYQVQQAINTCLKDPVRGFRQDESSSALCSHLYSMIRGNRQHRRAFLISLLNLFDDTAKTDVTMLLYIADNLACFPYQTQEEPLFIMHHIDITLSVSGSNLLQSFKESMVKDKRKERKSSPSKENESSDSEEEVSRPRKSRKRVDSDSDSDSEDDINSVMKCLPENSAPLIEFANVSQGILLLLMLKQHLKNLCGFSDSKIQKYSPSESAKVYDKAINRKTGVHFHPKQTLDFLRSDMANSKITEEVKRSIVKQYLDFKLLMEHLDPDEEEEEGEVSASTNARNKAITSLLGGGSPKNNTAAETEDDESDGEDRGGGTSGVRRRRSQRISQRIT

SEQ ID NO: 2419 - protein, 189 aa, Homo sapiens; identical to SEQ ID NO: 1938

SEQ ID NO: 2420 - protein, 193 aa, Homo sapiens
MVATGSLSSKNPASISELLDCGYHPESLLSDFDYWDYVVPEPNLNEVIFEESTCQNLVKMLENCLSKSKQTKLGCSKVLVPEKLTQRIAQDVLRLSSTEPCGLRGCVMHVNLEIENVCKKLDRIVCDSSVVPTFELTLVFKQENCSWTSFRDFFFSRGRFSSGFRRTLILSSGFRLVKKKLYSLIGTTVIEGS

SEQ ID NO: 2421 - protein, 679 aa, Homo sapiens
MISASRAAAARLVGAAASRGPTAARHQDSWNGLSHEAFRLVSRRDYASEAIKGAVVGIDLGTTNSCVAVMEGKQAKVLENAEGARTTPSVVAFTADGERLVGMPAKRQAVTNPNNTFYATKRLIGRRYDDPEVQKDIKNVPFKIVRASNGDAWVEAHGKLYSPSQIGAFVLMKMKETAENYLGHTAKNAVITVPAYFNDSQRQATKDAGQISGLNVLRVINEPTAAALAYGLDKSEDKVIAVYDLGGGTFDISILEIQKGVFEVKSTNGDTFLGGEDFDQALLRHIVKEFKRETGVDLTKDNMALQRVREAAEKAKCELSSSVQTDINLPYLTMDSSGPKHLNMKLTRAQFEGIVTDLIRRTIAPCQKAMQDAEVSKSDIGEVILVGGMTRMPKVQQTVQDLFGRAPSKAVNPDEAVAIGAAIQGGVLAGDVTDVLLLDVTPLSLGIETLGGVFTKLINRNTTIPTKKSQVFSTAADGQTQVEIKVCQGEREMAGDNKLLGQFTLIGIPPAPRGVPQIEVTFDIDANGIVHVSAKDKGTGREQQIVIQSSGGLSKDDIENMVKNAEKYAEEDRRKKERVEAVNMAEGIIHDTETKMEEFKDQLPADECNKLKEEISKMRELLARKDSETGENIRQAASSLQQASLKLFEMAYKKMASEREGSGSSGTGEQKEDQKEEKQ

SEQ ID NO: 2422 - protein, 306 aa, Homo sapiens
MLLTQVKQLLIIKLHCSIQCLLTPLHALETIIHITIQIASVPSTSLPSRKPCLMMMLTSFLTDLSLDHSDLVAELLKELSNHNERVEERKIALYELMKLTQEESFSVWDEHFKTILLLLLETLGDKEPTIRALALKVLREILRHQPARFKNYAELTVMKTLEAHKDPHKEVVRSAEEAASVLATSISPEQCIKVLCPIIQTADYPINLAAIKMQTKVIERVSKETLNLLLPEIMPGLIQGYDNSESSVRKACVFCLVAVHAVIGDELKPHLSQLTGSKMKLLNLYIKRAQTGSGGADPTTDVSGQS

SEQ ID NO: 2423 - protein, 435 aa, Homo sapiens
MLNMQGAEERDIRRETCPGWVNKNKPALEQDVCKIDSSGIVVKRFQEDEYQDSTFEEKYACEGMKENSPREIAESCLFQEGGFGRITFIHKEAPPEIISQGYNFEKSLLLTSSLVTRLRVSTEESLHQWETSNIQTNDISDQSKCPTLCTQKKSWKCNECGKTFTQSSSLTQHQRTHTGERPYTCEECGKAFSRSSFLVQHQRIHTGVKPYGCEQCGKTFRCRSFLTQHQRIHTGEKPYKCNECGNSFRNHSHLTEHQRIHTGEKPYKCNRCGKAFNQNTHLIHHQRIHTGEKPYICSECGSSFRKHSNLTQHQRIHTGEKPHKCDECGKTFQTKANLSQHQRLHSGEKPYKCKECGKAFCQSPSLIKHQRIHTGEKPYKCKECGKAFTQSTPLTKHQRIHTGERPYKCSECGLAFIQSICLIRHQRSHTWRKTL

SEQ ID NO: 2424 - protein, 328 aa, Homo sapiens
MAAVVVAAAGGAGPAVLQVAGLYRGLCAVRSRALGLGLVSPAQLRVFPVRPGSGRPEGGADSSGVGAEAELQANPFYDRYRDKIQLLRRSDPAAFESRLEKRSEFRKQPVGHSRQGDFIKCVEQKTDALGKQSVNRGFTKDKTLSSIFNIEMVKEKTAEEIKQIWQQYFAAKDTVYAVIPAEKFDLIWNRAQSCPTFLCALPRREGYEFFVGQWTGTELHFTALINIQTRGEAAASQLILYHYPELKEEKGIVLMTAEMDSTFLNVAEAQCIANQVQLFYATDRKETYGLVETFNLRPNEFKYMSVIAELEQSGLGAELKCAQNQNKT

SEQ ID NO: 2425 - protein, 700 aa, Homo sapiens
MKNMLLDLQNQKYIMQENENPNGDDISRKKLLVDQMFKYFDADSNGLVDINELTQVIKQEELGKDLFDCTLYVLLKYDDFNADKHLALEEFYRAFQVIQLSLPEDQKLSITAATVGQSAVLSCAIQGTLRPPIIWKRNNIILNNLDLEDINDFGDDGSLYITKVTTTHVGNYTCYADGYEQVYQTHIFQVNVPPVIRVYPESQAREPGVTASLRCHAEGIPKPQLGWLKNGIDITPKLSKQLTLQANGSEVHISNVRYEDTGAYTCIAKNEAGVDEDISSLFVEDSARKTLANILWREEGLGIGNMFYVFYEDGIKVIQPIECEFQRHIKPSEKLLGFQDEVCPKAEGDEVQRCVWASAVNVKDKFIYVAQPTLDRVLIVDVQSQKVVQAVSTDPVPVKLHYDKSHDQVWVLSWGTLEKTSPTLQVITLASGNVPHHTIHTQPVGKQFDRVDDFFIPTTTLIITHMRFGFILHKDEAALQKIDLETMSYIKTINLKDYKCVPQSLAYTHLGGYYFIGCKPDSTGAVSPQVMVDGVTDSVIGFNSDVTGTPYVSPDGHYLVSINDVKGLVRVQYITIRGEIQEAFDIYTNLHISDLAFQPSFTEAHQYNIYGSSSTQTDVLFVELSSGKVKMIKSLKEPLKAEEWPWNRKNRQIQDSGLFGQYLMTPSKDSLFILDGRLNKLNCEITEVEKGNTVIWVGDA

SEQ ID NO: 2426 - protein, 428 aa, Homo sapiens
MSYYLSSENHLDPGPIYMRENGQLHMVNLALDGVRSSLQKPRPFRLFPKGFSVELCMNREDDTARKEKTDHFIFTYTREGNLRYSAKSLFSLVLGFISDNVDHIDSLIGFPEQIAEKLFSAAEARQKFTEPGAGLRALQKFTEAYGSLVLCSLCLRNRYLVISEKLEEIKSFRELTCLDLSCCKLGDEHELLEHLTNEALSSVTQLHLKDNCLSDAGVRKMTAPVRVMKRGLENLTLLDLSCNPEITDAGIGYLFSFRKLNCLDISGTGLKDIKTVKHKLQTHIGLVHSKVPLKEFDHSNCKTEGWADQIVLQWERVTAEAVKPRETSEPRAAAQRFYGKRSRAEAPLKCPLADTHMNSSEKLQFYKEKAPDCHGPVLKHEAISSQESKKSKKRPFEESETEQNNSSQPSKQKYVCLAVEDWDLLNSY

SEQ ID NO: 2427 - protein, 658 aa, Homo sapiens
MVPRLLLRAWPRGPAVGPGAPSRPVSAGSGPGQYLQRSIVPTMHYQDSLPRLPIPKLEDTIRRYLSAQKPLLNDGQFRKTEQFCKSFENGIGKELHEQLVALDKQNKHTSYISGPWFDMYLSARDSVVLNFNPFMAFNPDPKSEYNDQLTRATNMTVSAIRFLKTLRAGLLEPEVFHLNPAKSDTITFKRLIRFVPSSLSWYGAYLVNAYPLDMSQYFRLFNSTRLPKPSRDELFTDDKARHLLVLRKGNFYIFDVLDQDGNIVSPSEIQAHLKYILSDSSPAPEFPLAYLTSENRDIWAELRQKLMSSGNEESLRKVDSAVFCLCLDDFPIKDLVHLSHNMLHGDGTNRWFDKSFNLIIAKDGSTAVHFEHSWGDGVAVLRFFNEVFKDSTQTPAVTPQSQPATTDSTVTVQKLNFELTDALKTGITAAKEKFDATMKTLTIDCVQFQRGGKEFLKKQKLSPDAVAQLAFQMAFLRQYGQTVATYESCSTAAFKHGRTETIRPASVYTKRCSEAFVREPSRHSAGELQQMMVECSKYHGQLTKEAAMGQGFDRHLFALRHLAAAKGIILPELYLDPAYGQINHNVLSTSTLSSPAVNLGGFAPVVSDGFGVGYAVHDNWIGCNVSSYPGRNAREFLQCVEKALEDMFDALEGKSIKS

SEQ ID NO: 2428 - protein, 194 aa, Homo sapiens
MFSTSAKIVKPNGEKPDEFESRISQALLELEMNLDLKAQLRELNIMAAKEIEVGGGQKAIIIFVPVPQLKSFQKIQVRLVCELEKKFSGKHVVFIAQRRILPKPTWKSCTKYKQKHPRSHTLTAVHDAILEDLVFTSKIVGKRIRVKLDGSRLMKVHLDKAQQNNVEHKVETFSGVYKKLMGKDVNFEFPEFQL

SEQ ID NO: 2429 - protein, 90 aa, Homo sapiens
MACPLDQAIGLLVAVFHKYSGMEGDKHTLSKNELKELIQKELTIGSKLQDAEIARLMEDLDRNKDQEVNFQEYVTFVGALALIYNEALKG

SEQ ID NO: 2430 - protein, 137 aa, Homo sapiens
MEVLEMRAKNPGPQLRKFKTNVLPFRQNDSSSHCQKSGSPISSKERRRRDKQHLDDITAARLLPLHHMPTQLLSIEESLALQKQQKQNYEEMQAKLAAQKLAERPNIKMRSYNPEGESSGRYREVRDEDDDWSSDEF

SEQ ID NO: 2431 - protein, 1630 aa, Homo sapiens
MTTTVATDYDNIEIQQQYSDVNNRWDVDDWDNENSSARLFERSRIKALADEREAVQKKTFTKWVNSHLARVSCRITDLYTDLRDGRMLIKLLEVLSGERLPKPTKGRMRIHCLENVDKALQFLKEQRVHLENMGSHDIVDGNHRLTLGLIWTIILRFQIQDISVETEDNKEKKSAKDALLLWCQMKTAGYPNVNIHNFTTSWRDGMAFNALIHKHRPDLIDFDKLKKSNAHYNLQNAFNLAEQHLGLTKLLDPEDISVDHPDEKSIITYVVTYYHYFSKMKALAVEGKRIGKVLDNAIETEKMIEKYESLASDLLEWIEQTIIILNNRKFANSLVGVQQQLQAFNTYRTVEKPPKFTEKGNLEVLLFTIQSKMRANNQKVYMPREGKLISDINKAWERLEKAEHERELALRNELIRQEKLEQLARRFDRKAAMRETWLSENQRLVSQDNFGFDLPAVEAATKKHEAIETDIAAYEERVQAVVAVARELEAENYHDIKRITARKDNVIRLWEYLLELLRARRQRLEMNLGLQKIFQEMLYIMDWMDEMKVLVLSQDYGKHLLGVEDLLQKHTLVEADIGIQAERVRGVNASAQKFATDGEGYKPCDPQVIRDRVAHMEFCYQELCQLAAERRARLEESRRLWKFFWEMAEEEGWIREKEKILSSDDYGKDLTSVMRLLSKHRAFEDEMSGRSGHFEQAIKEGEDMIAEEHFGSEKIRERIIYIREQWANLEQLSAIRKKRLEEASLLHQFQADADDIDAWMLDILKIVSSSDVGHDEYSTQSLVKKHKDVAEEIANYRPTLDTLHEQASALPQEHAESPDVRGRLSGIEERYKEVAELTRLRKQALQDTLALYKMFSEADACELWIDEKEQWLNNMQIPEKLEDLEVIQHRFESLEPEMNNQASRVAVVNQIARQLMHSGHPSEKEIKAQQDKLNTRWSQFRELVDRKKDALLSALSIQNYHLECNETKSWIREKTKVIESTQDLGNDLAGVMALQRKLTGMERDLVAIEAKLSDLQKEAEKLESEHPDQAQAILSRLAEISDVWEEMKTTLKNREASLGEASKLQQFLRDLDDFQSWLSRTQTAIASEDMPNTLTEAEKLLTQHENIKNEIDNYEEDYQKMRDMGEMVTQGQTDAQYMFLRQRLQALDTGWNELHKMWENRQNLLSQSHAYQQFLRDTKQAEAFLNNQEYVLAHTEMPTTLEGAEAAIKKQEDFMTTMDANEEKINAVVETGRRLVSDGNINSDRIQEKVDSIDDRHRKNRETASELLMRLKDNRDLQKFLQDCQELSLWINEKMLTAQDMSYDEARNLHSKWLKHQAFMAELASNKEWLDKIEKEGMQLISEKPETEAVVKEKLTGLHKMWEVLESTTQTKAQRLFDANKAELFTQSCADLDKWLHGLESQIQSDDYGKDLTSVNILLKKQQMLENQMEVRKKEIEELQSQAQALSQEGKSTDEVDSKRLTVQTKFMELLEPLNERKHNLLASKEIHQFNRDVEDEILWVGERMPLATSTDHGHNLQTVQLLIKKNQTLQKEIQGHQPRIDDIFERSQNIVTDSSSLSAEAIRQRLADLKQLWGLLIEETEKRHRRLEEAHRAQQYYFDAAEAEAWMSEQELYMMSEEKAKMSRVLSPC

SEQ ID NO: 2432 - protein, 118 aa, Homo sapiens
MAAPPEPGEPEERKSLKLLGFLDVENTPCARHSILYGSLGSVVAGFGHFLFTSRIRRSCDVGVGGFILVTLGCWFHCRYNYAKQRIQERIAREEIKKKILYEGTHLDPERKHNGSSSN

SEQ ID NO: 2433 - protein, 371 aa, Homo sapiens
  VARIANT 165: Xaa = Any Amino Acid
MSFRKVNIIILVLAVALFLLVLHHNFLSLSSLLRNEVTDSGIVGPQPIDFVPNALRHAVDGRQEEIPVVIAASEDRLGGAIAAINSIQHNTRSNVIFYIVTLNNTADHLRSWLNSDSLKSIRYKIVNFDPKLLEGKVKEDPDQGESMKPLTFARFYLPILVPSAXKAIYMDDDVIVQGDILALYNTALKPGHAAAFSEDCDSASTKVVIRGAGNQYNYIGYLDYKKERIRKLSMKASTCSFNPGVFVANLTEWKRQNITNQLEKWMKLNVEEGLYSRTLAGSITTPPLLIVFYQQHSTIDPMWNVRHLGSSAGKRYSPQFVKAAKLLHWNGHLKPWGRTASYTDVWEKWYIPDPTGKFNLIRRYTEISNIK

SEQ ID NO: 2434 - protein, 573 aa, Homo sapiens
MSSAAENGEAAPGKQNEEKTYKKTASSAIKGAIQLGIGYTVGNLTSKPERDVLMQDFYVVESVFLPSEGSNLTPAHHYPDFRFKTYAPLAFRYFRELFGIKPDDYLYSICSEPLIELSNPGASGSLFFVTSDDEFIIKTVQHKEAEFLQKLLPGYYMNLNQNPRTLLPKFYGLYCMQSGGINIRIVVMNNVLPRSMRMHFTYDLKGSTYKRRASRKEREKSNPTFKDLDFLQDMHEGLYFDTETYNALMKTLQRDCRVLESFKIMDYSLLLGIHFLDHSLKEKEEETPQNVPDAKRTGMQKVLYSTAMESIQGPGKSGDGIITENPDTMGGIPAKSHRGEKLLLFMGIIDILQSYRLMKKLEHSWKALVYDGDTVSVHRPSFYADRFLKFMNSRVFKKIQALKASPSKKRCNSIAALKATSQEIVSSISQEWKDEKRDLLTEGQSFSSLDEEALGSRHRPDLVPSTPSLFEAASLATTISSSSLYVNEHYPHDRPTLYSNSKGLPSSSTFTLEEGTIYLTAEPNTLEVQDDNASVLDVYLVSENGDHLSTWMRREHSYGREVSPHQNYPQQLG

SEQ ID NO: 2435 - protein, 538 aa, Homo sapiens
MNLELLESFGQNYPEEADGTLDCISMALTCTFNRWGTLLAVGCNDGRIVIWDFLTRGIAKIISAHIHPVCSLCWSRDGHKLVSASTDNIVSQWDVLSGDCDQRFRFPSPILKVQYHPRDQNKVLVCPMKSAPVMLTLSDSKHVVLPVDDDSDLNVVASFDRRGEYIYTGNAKGKILVLKTDSQDLVASFRVTTGTSNTTAIKSIEFARKGSCFLINTADRIIRVYDGREILTCGRDGEPEPMQKLQDLVNRTPWKKCCFSGDGEYIVAGSARQHALYIWEKSIGNLVKILHGTRGELLLDVAWHPVRPIIASISSGVVSIWAQNQVENWSAFAPDFKELDENVEYEERESEFDIEDEDKSEPEQTGADAAEDEEVDVTSVDPIAAFCSSDEELEDSKALLYLPIAPEVEDPEENPYGPPPDAVQTSLMDEGASSEKKRQSSADGSQPPKKKPKTTNIELQGVPNDEVHPLLGVKGDGKSKKKQAGRPKGSKGKEKDSPFKPKLYKGDRGLPLEGSAKGKVQAELSQPLTAGGAISELL

SEQ ID NO: 2436 - protein, 3647 aa, Homo sapiens
MGARAKTRSSSCELMMKWFCSAPQPSTKNNRSYAWQQKDLATDFVSWSPLPIPRMCPQTSPSAPLCWSSPSLSGRCRRCWLTPWRNQKGQVDVEKWKFMMKTAQGGGHRTLLYGHAILLRHSYSGMYLCCLSTSRSSTDKLAFDVGLQEDTTGEACWWTIHPASKQRSEGEKVRVGDDLILVSVSSERYLHLSYGNGSLHVDAAFQQTLWSVAPISSGSEAAQGYLIGGDVLRLLHGHMDECLTVPSGEHGEEQRRTVHYEGGAVSVHARSLWRLETLRVAWSGSHIRWGQPFRLRHVTTGKYLSLMEDKNLLLMDKEKADVKSTAFTFRSSKEKLDVGVRKEVDGMGTSEIKYGDSVCYIQHVDTGLWLTYQSVDVKSVRMGSIQRKAIMHHEGHMDDGISLSRSQHEESRTARVIRSTVFLFNRFIRGLDALSKKAKASTVDLPIESVSLSLQDLIGYFHPPDEHLEHEDKQNRLRALKNRQNLFQEEGMINLVLECIDRLHVYSSAAHFADVAGREAGESWKSILNSLYELLAALIRGNRKNCAQFSGSLDWLISRLERLEASSGILEVLHCVLVESPEALNIIKEGHIKSIISLLDKHGRNHKVLDVLCSLCVCHGVAVRSNQHLICDNLLPGRDLLLQTRLVNHVSSMRPNIFLGVSEGSAQYKKWYYELMVDHTEPFVTAEATHLRVGWASTEGYSPYPGGGEEWGGNGVGDDLFSYGFDGLHLWSGCIARTVSSPNQHLLRTDDVISCCLDLSAPSISFRINGQPVQGMFENFNIDGLFFPVVSFSAGIKVRFLLGGRHGEFKFLPPPGYAPCYEAVLPKEKLKVEHSREYKQERTYTRDLLGPTVSLTQAAFTPIPVDTSQIVLPPHLERIREKLAENIHELWVMNKIELGWQYGPVRDDNKRQHPCLVEFSKLPEQERNYNLQMSLETLKTLLALGCHVGISDEHAEDKVKKMKLPKNYQLTSGYKPAPMDLSFIKLTPSQEAMVDKLAENAHNVWARDRIRQGWTYGIQQDVKNRRNPRLVPYTLLDDRTKKSNKDSLREAVRTLLGYGYNLEAPDQDHAARAEVCSGTGERFRIFRAEKTYAVKAGRWYFEFETVTAGDMRVGWSRPGCQPDQELGSDERAFAFDGFKAQRWHQGNEHYGRSWQAGDVVGCMVDMNEHTMMFTLNGEILLDDSGSELAFKDFDVGDGFIPVCSLGVAQVGRMNFGKDVSTLKYFTICGLQEGYEPFAVNTNRDITMWLSKRLPQFLQVPSNHEHIEVTRIDGTIDSSPCLKVTQKSFGSQNSNTDIMFYRLSMPIECAEVFSKTVAGGLPGAGLFGPKNDLEDYDADSDFEVLMKTAHGHLVPDRVDKDKEATKPEFNNHKDYAQEKPSRLKQRFLLRRTKPDYSTSHSARLTEDVLADDRDDYDFLMQTSTYYYSVRIFPGQEPANVWVGWITSDFHQYDTGFDLDRVRTVTVTLGDEKGKVHESIKRSNCYMVCAGESMSPGQGRNNNGLEIGCVVDAASGLLTFIANGKELSTYYQVEPSTKLFPAVFAQATSPNVFQFELGRIKNVMPLSAGLFKSEHKNPVPQCPPRLHVQFLSHVLWSRMPNQFLKVDVSRISERQGWLVQCLDPLQFMSLHIPEENRSVDILELTEQEELLKFHYHTLRLYSAVCALGNHRVAHALCSHVDEPQLLYAIENKYMPGLLRAGYYDLLIDIHLSSYATARLMMNNEYIVPMTEETKSITLFPDENKKHGLPGIGLSTSLRPRMQFSSPSFVSISNECYQYSPEFPLDILKSKTIQMLTEAVKEGSLHARDPVGGTTEFLFVPLIKLFYTLLIMGIFHNEDLKHILQLIEPSVFKEAATPEEESDTLEKELSVDDAKLQGAGEEEAKGGKRPKEGLLQMKLPEPVKLQMCLLLQYLCDCQVRHRIEAIVAFSDDFVAKLQDNQRFRYNEVMQALNMSAALTARKTKEFRSPPQEQINMLLNFKDDKSECPCPEEIRDQLLDFHEDLMTHCGIELDEDGSLDGNSDLTIRGRLLSLVEKVTYLKKKQAEKPVESDSKKSSTLQQLISETMVRWAQESVIEDPELVRAMFVLLHRQYDGIGGLVRALPKTYTINGVSVEDTINLLASLGQIRSLLSVRMGKEEEKLMIRGLGDIMNNKVFYQHPNLMRALGMHETVMEVMVNVLGGGESKEITFPKMVANCCRFLCYFCRISRQNQKAMFDHLSYLLENSSVGLASPAMRGSTPLDVAAASVMDNNELALALREPDLEKVVRYLAGCGLQSCQMLVSKGYPDIGWNPVEGERYLDFLRFAVFCNGESVEENANVVVRLLIRRPECFGPALRGEGGNGLLAAMEEAIKIAEDPSRDGPSPNSGSSKTLDTEEEEDDTIHMGNAIMTFYSALIDLLGRCAPEMHLIHAGKGEAIRIRSILRSLIPLGDLVGVISIAFQMPTIAKDGNVVEPDMSAGFCPDHKAAMVLFLDRVYGIEVQDFLLHLLEVGFLPDLRAAASLDTAALSATDMALALNRYLCTAVLPLLTRCAPLFAGTEHHASLIDSLLHTVYRLSKGCSLTKAQRDSIEVCLLSICGQLRPSMMQHLLRRLVFDVPLLNEHAKMPLKLLTNHYERCWKYYCLPGGWGNFGAASEEELHLSRKLFWGIFDALSQKKYEQELFKLALPCLSAVAGALPPDYMESNYVSMMEKQSSMDSEGNFNPQPVDTSNITIPEKLEYFINKYAEHSHDKWSMDKLANGWIYGEIYSDSSKVQPLMKPYKLLSEKEKEIYRWPIKESLKTMLAWGWRIERTREGDSMALYNRTRRISQTSQVSVDAAHGYSPRAIDMSNVTLSRDLHAMAEMMAENYHNIWAKKKKMELESKGGGNHPLLVPYDTLTAKEKAKDREKAQDILKFLQINGYAVSRGFKDLELDTPSIEKRFAYSFLQQLIRYVDEAHQYILEFDGGSRGKGEHFPYEQEIKFFAKVVLPLIDQYFKNHRLYFLSAASRPLCSGGHASNKEKEMVTSLFCKLGVLVRHRISLFGNDATSIVNCLHILGQTLDARTVMKTGLESVKSALRAFLDNAAEDLEKTMENLKQGQFTHTRNQPKGVTQIINYTTVALLPMLSSLFEHIGQHQFGEDLILEDVQVSCYRILTSLYALGTSKSIYVERQRSALGECLAAFAGAFPVAFLETHLDKHNIYSIYNTKSSRERAALSLPTNVEDVCPNIPSLEKLMEEIVELAESGIRYTQMPHVMEVILPMLCSYMSRWWEHGPENNPERAEMCCTALNSEHMNTLLGNILKIIYNNLGIDEGAWMKRLAVFSQPIINKVKPQLLKTHFLPLMEKLKKKAATVVSEEDHLKAEARGDMSEAELLILDEFTTLARDLYAFYPLLIRFVDYNRAKWLKEPNPEAEELFRMVAEVFIYWSKSHNFKREEQNFVVQNEINNMSFLITDTKSKMSKAAVSDQERKKMKRKGDRYSMQTSLIVAALKRLLPIGLNICAPGDQELIALAKNRFSLKDTEDEVRDIIRSNIHLQGKLEDPAIRWQMALYKDLPNRTDDTSDPEKTVERVLDIANVLFHLEQKSKRVGRRHYCLVEHPQRSKKAVWHKLLSKQRKRAVVACFRMAPLYNLPRHRAVNLFLQGYEKSWIETEEHYFEDKLIEDLAETWG

SEQ ID NO: 2437 - protein, 467 aa, Homo sapiens
MSQGVRRAGAGQGVAAAVQLLVTLSFLRSVVEAQVTGVLDDCLCDIDSIDNFNTYKIFPKIKKLQERDYFRYYKVNLKRPCPFWAEDGHCSIKDCHVEPCPESKIPVGIKAGHSNKYLKMANNTKELEDCEQANKLGAINSTLSNQSKEAFIDWARYDDSRDHFCELDDERSPAAQYVDLLLNPERYTGYKGTSAWRVWNSIYEENCFKPRSVYRPLNPLAPSRGEDDGESFYTWLEGLCLEKRVFYKLISGLHASINLHLCANYLLEETWGKPSWGPNIKEFKHRFDPVETKGEGPRRLKNLYFLYLIELRALSKVAPYFERSIVDLYTGNAEEDADTKTLLLNIFQDTKSFPMHFDEKSMFAGDKKGAKSLKEEFRLHFKNISRIMDCVGCDKCRLWGKLQTQGLGTALKILFSEKEIQKLPENSPSKGFQLTRQEIVALLNAFGRLSTSIRDLQNFKVLLQHSR

SEQ ID NO: 2438 - protein, 1121 aa, Homo sapiens
MHSDEMIYDDVENGDEGGNSSLEYGWSSSEFESYEEQSDSECKNGIPRSFLRSNHKKQLSHDLTRLKEHYEKKMRDLMASTVGVVEIQQLRQKHELKMQKLVKAAKDGTKDGLERTRAAVKRGRSFIRTKSLIAQDHRSSLEEEQNLFIDVDCKHPEAILTPMPEGLSQQQVVRRYILGSVVDSEKNYVDALKRILEQYEKPLSEMEPKVLSERKLKTVFYRVKEILQCHSLFQIALASRVSEWDSVEMIGDVFVASFSKSMVLDAYSEYVNNFSTAVAVLKKTCATKPAFLEFLKQEQEASPDRTTLYSLMMKPIQRFPQFILLLQDMLKNTSKGHPDRLPLQMALTELETLAEKLNERKRDADQRCEVKQIAKAINERYLNKLLSSGSRYLIRSDDMIETVYNDRGEIVKTKERRVFMLNDVLMCATVSSRPSHDSRVMSSQRYLLKWSVPLGHVDAIEYGSSAGTGEHSRHLAVHPPESLAVVANAKPNKVYMGPGQLYQDLQNLLHDLNVIGQITQLIGNLKGNYQNLNQSVAHDWTSGLQRLILKKEDEIRAADCCRIQLQLPGKQDKSGRPTFFTAVFNTFTPAIKESWVNSLQMAKLALEEENHMGWFCVEDDGNHIKKEKHPLLVGHMPVMVAKQQEFKIECAAYNPEPYLNNESQPDSFSTAHGFLWIGSCTHQMGQIAIVSFQNSTPKVIECFNVESRILCMLYVPVEEKRREPGAPPDPETPAVRASDVPTICVGMEEGSISIYKSSQGSKKVRLQHFFTPEKSTVMSLACTSQSLYAGLVNGAVASYARAPDGSWDSEPQKVIKLGVLPVRSLLMMEDTLWAASGGQVFIISVETHAVEGQLEAHQEEGMVISHMAVSGVGIWIAFTSGSTLRLFHTETLKHLQDINIATPVHNMLPGHQRLSVTSLLVCHGLLMVGTSLGVLVALPVPRLQGIPKVTGRGMVSYHAHNSPVKFIVLATALHEKDKDKSRDSLAPGPEPQDEDQKDALPSGGAGSSLSQGDPDAAIWLGDSLGSMTQKSDLSSSSGSLSLSHGSSSLEHRSEDSTIYDLLKDPVSLRSKARRAKKAKASSALVVCGGQGHRRVHRKARQPHQEELAPTVMVWQIPLLNI

SEQ ID NO: 2439 - protein, 191 aa, Homo sapiens
  VARIANT 30, 31, 32, 33, 34, 35, 36, 37, 38, 39, 40, 41, 42, 43, 44,45, 46, 47, 48, 49, 50, 51, 52, 53, 54, 55, 56, 57, 58,59, 60, 61, 62, 63, 64, 65, 66, 67, 68, 69, 70, 71, 72,73, 74, 75, 76, 77, 78, 79, 80, 81, 82, 83, 84, 85, 86,87: Xaa = Any Amino Acid
  VARIANT 88, 89, 90, 91, 92, 93, 94, 95, 96, 97, 98, 99, 100, 101,102, 103, 104, 105, 106, 107, 108, 109, 110, 111, 112, 113,114, 115, 116, 117, 118, 119, 120, 121, 122, 123, 124, 125,126, 127, 128, 129, 130, 131, 132, 133, 134, 135, 136: Xaa = Any Amino Acid
  VARIANT 137, 138, 139, 140, 141, 142, 143, 144, 145, 146, 147, 148,149, 150, 151, 152, 153, 154, 155: Xaa = Any Amino Acid
MNTLLSSLTAKTPRPAPFSSGGLAKRFSRXXXXXXXXXXXXXXXXXXXXXXXXXXXXXXXXXXXXXXXXXXXXXXXXXXXXXXXXXXXXXXXXXXXXXXXXXXXXXXXXXXXXXXXXXXXXXXXXXXXXXXXXXXXXXXXXXXXXXXXXXXXXXXRQFCYCELMTSFQATKRKAMTRAGKAGLLMLARSEC

SEQ ID NO: 2440 - protein, 282 aa, Homo sapiens
  VARIANT 238, 239, 240, 241, 242, 243, 244, 245, 246, 247, 248, 249,250, 251, 252, 253, 254, 255, 256: Xaa = Any Amino Acid
MSGSSLPSALALSLLLVSGSLLPGPGAAQNEPRIVTSEEVIIRDSPVLPVTLQCNLTSSSHTLTYSYWTKNGVELSATRKNASNMEYRINKPRAEDSGEYHCVYHFVSAPKANATIEVKAAPDITGHKRSENKNEGQDATMYCKSVGYPHPDWIWRKKENGMPMDIVNTSGRFFIINKENYTELNIVNLQITEDPGEYECNATNAIGSASVVTVLRVRSHLAPLWPFLGILAEIIILXXXXXXXXXXXXXXXXXXXDEPAGPMKTNSTNNHKDKNLRQRNTN

SEQ ID NO: 2441 - protein, 208 aa, Homo sapiens
MKVLLAAALIAGSVFFLLLPGPSAADEKKKGPKVTVKVYFDLRIGDEDVGRVIFGLFGKTVPKTVDNFVALATGEKGFGYKNSKFHRVIKDFMIQGGDFTRGDGTGGKSIYGERFPDENFKLKHYGPGWVSMANAGKDTNGSQFFITTVKTAWLDGKHVVFGKVLEGMEVVRKVESTKTDSRDKPLKDVIIADCGKIEVEKPFAIAKE

SEQ ID NO: 2442 - protein, 136 aa, Homo sapiens
MSRTNRPPLSLSRMIRKMKLPGRENKTAVVVGTITDDVRVQEVPKLKVCALRVTSRARSRILRAGGKILTFDQLALDSPKGCGTVLLSGPRKGREVYRHFGKAPGTPHSHTKPYVRSKGRKFERARGRRASRGYKN

SEQ ID NO: 2443 - protein, 474 aa, Homo sapiens
MLEPALATGEELPELTLLTTLLEGPGDKTQPPEEETLSQAPESEEEQKKKALERSMYVLSELVETEKMYVDDLGQIVEGYMATMAAQGVPESLRGRDRIVFGNIQQIYEWHRDYFLQELQRCLKDPDWLAQLFIKHERRLHMYVVYCQNKPKSEHVVSEFGDSYFEELRQQLGHRLQLNDLLIKPVQRIMKYQLLLKDFLKYYNRAGMDTADLEQAVEVMCFVPKRCNDMMTLGRLRGFEGKLTAQGKLLGQDTFWVTEPEAGGLLSSRGRERRVFLFEQIIIFSEALGGGVRGGTQPGYVYKNSIKVSCLGLEGNLQGDPCRFALTSRGPEGGIQRYVLQAADPAISQAWIKHVAQILESQRDFLNALQSPIEYQRRESQTNSLGRPRGPGVGSPGRIQLGDQAQGSTHTPINGSLPSLLLSPKGEVARALLPLDKQALGDIPQAPHDSPPVSPTPKTPPCQARLAKLDEDEL

SEQ ID NO: 2444 - protein, 215 aa, Homo sapiens
MSRRCRRCHHPRGRREEEECGAAAPGPRRDPDMELREEAWSPGPLDSEDQQMASHENPVDILIMDDDDVPSWPPTKLSPPQSAPPAGPRQPWRARGQRPRGPGRGAPRPPSRTCVWSAGRASGTGPGSWRTSGPSTGTGSGRRGARSRPTSAWSAGRASCRAPRSGDTRRSTRWARPRSAAAADRATTARAGRRRTTTTTRPRAGGAPSAAVGRA

SEQ ID NO: 2445 - protein, 295 aa, Homo sapiens
MEHQLLCCEVETIRRAYPDANLLNDRVLRAMLKAEETCAPSVSYFKCVQKEVLPSMRKIVATWMLEVCEEQKCEEEVFPLAMNYLDRFLSLEPVKKSRLQLLGATCMFVASKMKETIPLTAEKLCIYTDNSIRPEELLQMELLLVNKLKWNLAAMTPHDFIEHFLSKMPEAEENKQIIRKHAQTFVALCATDVKFISNPPSMVAAGSVVAAVQGLNLRSPNNFLSYYRLTRFLSRVIKCDPDCLRACQEQIEALLESSLRQAQQNMDPKAAEEEEEEEEEVDLACTPTDVRDVDI

SEQ ID NO: 2446 - protein, 426 aa, Homo sapiens [sequence omitted]

SEQ ID NO: 2447 - protein, 862 aa, Homo sapiens
MAQPGPASQPDVSLQQRVAELEKINAEFLRAQQQLEQEFNQKRAKFKELYLAKEEDLKRQNAVLQAAQDDLGHLRTQLWEAQAEMENIKAIATVSENTKQEAIDEVKRQWREEVASLQAVMKETVRDYEHQFHLRLEQERTQWAQYRESAEREIADLRRRLSEGQEEENLENEMKKAQEDAEKLRSVVMPMEKEIAALKDKLTEAEDKIKELEASKVKELNHYLEAEKSCRTDLEMYVAVLNTQKSVLQEDAEKLRKELHEVCHLLEQERQQHNQLKHTWQKANDQFLESQRLLMRDMQRMEIVLTSEQLRQVEELKKKDQEDDEQQRLNKRKDHKKADVEEEIKIPVVCALTQEESSAQLSNEEEHLDSTRGSVHSLDAGLLLPSGDPFSKSDNDMFKDGLRRAQSTDSLGTSGSLQSKALGYNYKAKSAGNLDESDFGPLVGADSVSENFDTASLGSLQMPSGFMLTKDQERAIKAMTPEQEETASLLSSVTQGMESAYVSPSGYRLVSETEWNLLQKEVHNAGNKLGRRCDMCSNYEKQLQGIQIQEAETRDQVKKLQLMLRQANDQLEKTMKDKQELEDFIKQSSEDSSHQISALVLRAQASEILLEELQQGLSQAKRDVQEQMAVLMQSREQVSEELVRLQKDNDSLQGKHSLHVSLQQAEDFILPDTTEALRELVLKYREDIINVRTAADHVEEKLKAEILFLKEQIQAEQCLKENLEETLQLEIENCKEEIASISSLKAELERIKVEKGQLESTLREKSQQLESLQEIKISLEEQLKKETAAKATVEQLMFEEKNKAQRLQTELDVSEQVQRDFVKLSQTLQVQLERIRQADSLERIRAILNDTKLTDINQLPET

SEQ ID NO: 2448 - protein, 1056 aa, Homo sapiens
MAGGRGSGGHALHAGSEGVKLLATVLSQKSVSESGPGDSPAKPPEGSAGVARSQPPVAHAGQVYGEQPPKKLEPASEGKSSEAVSQWLTAFQLQLYAPNFISAGYDLPTISRMTPEDLTAIGVTKPGHRKKIAAEISGLSIPDWLPEHKPANLAVWLSMIGLAQYYKVLVDNGYENIDFITDITWEDLQEIGITKLGHQKKLMLAVRKLAELQKAEYAKYEGGPLRRKAPQSLEVMAIESPPPPEPTPADCQSPKMTTFQDSELSDELQAAMTGPAEVGPTTEKPSSHLPPTPRATTRQDSSLGGRARHMSSSQELLGDGPPGPSSPMSRSQEYLLDEGPAPGTPPREARPGRHGHSIKRASVPPVPGKPRQVLPPGTSHFTPPQTPTKTRPGSPQALGGPHGPAPATAKVKPTPQLLPPTERPMSPRSLPQSPTHRGFAYVLPQPVEGEVGPAAPGPAPPPVPTAVPTLCLPPEADAEPGRPKKRAHSLNRYAASDSEPERDELLVPAAAGPYATVQRRVGRSHSVRAPAGADKNVNRSQSFAVRPRKKGPPPPPPKRSSSALASANLADEPVPDAEPEDGLLGVRAQCRRASDLAGSVDTGSAGSVKSIAAMLELSSIGGGGRAARRPPEGHPTPRPASPEPGRVATVLASVKHKEAIGPGGEVVNRRRTLSGPVTGLLATARRGPGESADPGPFVEDGTGRQRPRGPSKGEAGVEGPPLAKVEASATLKRRIRAKQNQQENVKFILTESDTVKRRPKAKEREAGPEPPPPLSVYHNGTGTVRRRPASEQAGPPELPPPPPPAEPPPTDLAHLPPLPPPEGEARKPAKPPVSPKPVLTQPVPKLQGSPTPTSKKVPLPGPWQPRGEARPRHATARVSQAAAAAHSAQARQGGRGAAFGQRRPFTRTLARATAARRPRQAARYAALAGRQPRQAPVPRRARAARARQAPASRRRRRRRRRRAPRPARRRLVRGQRPAETGGDKRVPCRGAAGGGGEDPAGGRAGPAATRRRKRALAASWTTSAACSTTWPTSWMPCWSERRLAGPSRAARALPAH

SEQ ID NO: 2449 - protein, 635 aa, Homo sapiens
MIITIILEMRKLECSTVPPLTKVDVKMETIERKISVREQTMSEKEELNKKKRNMGDVSMHGLPLVQDQEDSEGDISKDPDKQLAQKFKTYELTLKDVQNILMYWDRKQGVQLPPAGMEEAPHEPDDQRQVPSGGRRGRKDRERERLEKERLEREEAERERLEKLRDLEERSDWEGEGEEDHEEKKEKDLGVPFLNIQTPDFEGLSWKQALESDRLPKGEQAQEEQTSSSKGGKQKMKEKIDQVFESQKDKRHMALNRKVLSGEPAGTISQLSDTDLDNFNGQHSQEKFTRLNHFRWIVPANGEVTLQVHFSSDEFGNFDQTFNFEILGTCCQYQLYCRGICTYPYICQDPKVVFPQRKMDMKTNEVIFKKYVMSTETYYFGPLLCGKSRDKYKSSLFPGNMETLTILNTSLMVVEASFYFQNDVKANTYFLEPNTMVLKPNEKQILNVWAYPTSVGVFEDSIVCCINDNPEPAIFQLSCQGIRPELELEPRQLHFDRLLLHRQESRVVLLRNVTLLPVAWRITSLEHLGDDFTVSLMQGTIPPEAEYGLHLYFQPTKPVNIKKAIRLEVLDAENLLGVVQIENIMVFAEAYDIALDITFPKGAEGGLDFGIVRVTEEAKQPLQLKNRGKYEIAFR

SEQ ID NO: 2450 - protein, 1238 aa, Homo sapiens [sequence omitted]

SEQ ID NO: 2451 - protein, 87 aa, Homo sapiens
MESASEAAKKYTENDQLKKGAAVDGGKLDVGNAEVKLEEENRSLKAELQKLKDELASTKQKLEKAENQVLAMRKQSEGLTKEYDRLQ

SEQ ID NO: 2452 - protein, 837 aa, Homo sapiens [sequence omitted]

SEQ ID NO: 2453 - protein, 3336 aa, Homo sapiens
MEVEQEQRRRKVEAGRTKLAHFRQRKTKGDSSHSEKKTAKRKGSAVDASVQEESPVTKEDSALCGGGDICKSTSCDDTPDGAGGAFAAQPEDCDGEKREDLEQLQQKQVNDHPPEQCGMFTVSDHPPEQHGMFTVGDHPPEQRGMFTVSDHPPEQHGMFTVSDHPPEQRGMFTISDHQPEQRGMFTVSDHTPEQRGIFTISDHPAEQRGMFTKECEQECELAITDLESGREDEAGLHQSQAVHGLELEALRLSLSNMHTAQLELTQANLQKEKETALTELREMLNSRRAQELALLQSRQQHELELLREQHAREKEEVVLRCGQEAAELKEKLQSEMEKNAQIVKTLKEDWESEKDLCLENLRKELSAKHQSEMEDLQNQFQKELAEQRAELEKIFQDKNQAERALRNLESHHQAAIEKLREDLQSEHGRCLEDLEFKFKESEKEKQLELENLQASYEDLKAQSQEEIRRLWSQLDSARTSRQELSELHEQLLARTSRVEDLEQLKQREKTQHESELEQLRIYFEKKLRDAEKTYQEDLTLLQQRLQGAREDALLDSVEVGLSCVGLEEKPEKGRKDHVDELEPERHKESLPRFQAELEESHRHQLEALESPLCIQHEGHVSDRCCVETSALGHEWRLEPSEGHSQELPWVHLQGVQDGDLEADTERAARVLGLETEHKVQLSLLQTELKEEIELLKIENRNLYGKLQHETRLKDDLEKVKHNLIEDHQKELNNAKQKTELMKQEFQRKETDWKVMKEELQREAEEKLTLMLLELREKAESEKQTIINKFELREAEMRQLQDQQAAQILDLERSLTEQQGRLQQLEQDLTSDDALHCSQCGREPPTAQDGELAALHVKEDCALQLMLARSRFLEERKEITEKFSAEQDAFLQEAQEQHARELQLLQERHQQQLLSVTAELEARHQAALGELTASLESKQGALLAARVAELQTKHAADLGALETRHLSSLDSLESCYLSEFQTIREEHRQALELLRADFEEQLWKKDSLHQTILTQELEKLKRKHEGELQSVRDHLRTEVSTELAGTVAHELQGVHQGEFGSEKKTALHEKEETLRLQSAQAQPFHQEEKESLSLQLQKKNHQVQQLKDQVLSLSHEIEECRSELEVLQQRRERENREGANLLSMLKADVNLSHSERGALQDALRRLLGLFGETLRAAVTLRSRIGERVGLCLDDAGAGLALSTAPALEETWSDVALPELDRTLSECAEMSSVAEISSHMRESFLMSPESVRECEQPIRRVFQSLSLAVDGLMEMALDSSRQLEEARQIHSRFEKEFSFKNEETAQVVRKHQELLECLKEESAAKAELALELHKTQGTLEGFKVETADLKEVLAGKEDSEHRLVLELESLRRQLQQAAQEQAALREECTRLWSRGEATATDAEAREAALRKEVEDLTKEQSETRKQAEKDRSALLSQMKILESELEEQLSQHRGCAKQAEAVTALEQQVASLDKHLRNQRQFMDEQAAEREHEREEFQQEIQRLEGQLRQAAKPQPWGPRDSQQAPLDGEVELLQQKLREKLDEFNELAIQKESADRQVLMQEEEIKRLEEMNINIRKKVAQLQEEVEKQKNIVKGLEQDKEVLKKQQMSSLLLASTLQSTLDAGRCPEPPSGSPPEGPEIQLEVTQRALLRRESEVLDLKEQLEKMKGDLESKNEEILHLNLKLDMQNSQTAVSLRELEEENTSLKVIYTRSSEIEELKATIENLQENQKRLQKEKAEEIEQLHEVIEKLQHELSLMGPVVHEVSDSQAGSLQSELLCSQAGGPRGQALQGELEAALEAKEALSRLLADQERRHSQALEALQQRLQGAEEAAELQLAELERNVALREAEVEDMASRIQEFEAALKAKEATIAERNLEIDALNQRKAAHSAELEAVLLALARIRRALEQQPLAAGAAPPELQWLRAQCARLSRQLQVLHQRFLRCQVELDRRQARRATAHTRVPGAHPQPRMDGGAKAQVTGDVEASHDAALEPVVPDPQGDLQPVLVTLKDAPLCKQEGVMSVLTVCQRQLQSELLLVKNEMRLSLEDGGKGKEKVLEDCQLPKVDLVAQVKQLQEKLNRLLYSMTFQNVDAADTKSLWPMASAHLLESSWSDDSCDGEEPDISPHIDTCDANTATGGVTDVIKNQAIDACDANTTPGGVTDVIKNWDSLIPDEMPDSPIQEKSECQDMSLSSPTSVLGGSRHQSHTAEAGPRKSPVGMLDLSSWSSPEVLRKDWTLEPWPSLPVTPHSGALSLCSADTSLGDRADTSLPQTQGPGLLCSPGVSAAALALQWAESPPADDHHVQRTAVEKDVEDFITTSFDSQETLSSPPPGLEGKADRSEKSDGSGFGARLSPGSGGPEAQTAGPVTPASISGRFQPLPEAMKEKEVRPKHVKALLQMVRDESHQILALSEGLAPPSGEPHPPRKEDEIQDISLHGGKTQEVPTACPDWRGDLLQVVQEAFEKEQEMQGVELQPRLSGSDLGGHSSLLERLEKIIREQGDLQEKSLEHLRLPDRSSLLSEIQALRAQLRMTHLQNQEKLQHLRTALTSAEARGSQQEHQLRRQVELLAYKVEQEKCIAGDLQKTLSEEQEKANSVQKLLAAEQTVVRDLKSDLCESRQKSEQLSRSLCEVQQEVLQLRSMLSSKENELKAALQELESEQGKGRALQSQLEEEQLRHLQRESQSAKALEELRASLETQRAQSSRLCVALKHEQTAKDNLQKELRIEHSRCEALLAQERSQLSELQKDLAAEKSRTLELSEALRHERLLTEQLSQRTQEACVHQDTQAHHALLQKLKEEKSRVVDLQAMLEKVQQQALHSQQQLEAEAQKHCEALRREKEVSATLKSTVEALHTQKRELRCSLEREREKPAWLQAELEQSHPRLKEQEGRKAARRSAEARQSPAAAEQWRKWQRDKEKLRELELQRQRDLHKIKQLQQTVRDLESKDEVPGSRLHLGSARRAAGSDADHLREQQRELEAMRQRLLSAARLLTSFTSQAVDRTVNDWTSSNEKAVMSLLHTLEELKSDLSRPTSSQKKMAAELQFQFVDVLLKDNVSLTKALSTVTQEKLELSRAVSKLEKLLKHHLQKGCSPSRSERSAWKPDETAPQSSLRRPDPGRLPPAASEEAHTSNVKMEKLYLHYLRAESFRKALIYQKKYLLLLIGGFQDSEQETLSMIAHLGVFPSKAERKITSRPFTRFRTAVRVVIAILRLRFLVKKWQEVDRKGALAQGKAPRPGPRARQPQSPPRTRESPPTRDVPSGHTRDPARGRRLAAAASPHSGGRATPSPNSRLERSLTASQDPEHSLTEYIHHLEVIQQRLGGVLPDSTSKKSCHPMIKQ

SEQ ID NO: 2454 - protein, 126 aa, Homo sapiens
MAAGPEPPEWEPRWRKALRGKENKGSVEIMRKDLNDARDLHGQAESAAAVWKGHVMDRRKKALTDYKKLRAFFVEEEEHFLQEAEKEEGLPEDELADPTERFRSLLQAVSELEKKHRNLGLSMLLQ

SEQ ID NO: 2455 - protein, 293 aa, Homo sapiens
MTGLYELVWRVLHALLCLHRTLTSWLRVRFGTWNWIWRRCCRAASAAVLAPLGFTLRKPPAVGRNRRHHRHPRGGSCLAAAHHRMRWRADGRSLEKLPVHMGLVITEVEQEPSFSDIASLVVWCMAVGISYISVYDHQGIFKRNNSRLMDEILKQQQELLGLDCSKYSPEFANSNDKDDQVLNCHLAVKVLSPEDGKADIVRAAQDFCQLVAQKQKRPTDLDVDTLGSLLSSNGCPDPDLVLKFGPVDSTLGFLPWHIRLTEIVSLPSHLNISYEDFFSALRQYAACEQRLGK

SEQ ID NO: 2456 - protein, 527 aa, Homo sapiens
  VARIANT 103, 104, 105, 106, 107, 108, 109, 110, 111, 112, 113, 114,115, 116, 117, 118, 119, 120, 121, 122, 123, 124, 125, 126,127, 128, 129, 130, 131, 132, 133, 134, 135, 136, 137, 138,139, 140, 141, 142, 143, 144, 145, 146, 147, 148, 149: Xaa = Any Amino Acid
  VARIANT 150, 151, 152, 153, 154, 155, 156, 157, 158, 159, 160, 161,162, 163, 164, 165, 166, 167, 168, 169, 170, 171: Xaa = Any Amino Acid
MENQEKASIAGHMFDVVVIGGGISGLSAAKLLTEYGVSVLVLEARDRVGGRTYTIRNEHVDYVDVGGAYVGPTQNRILRLSKELGIETYKVNVSERLVQYVKXXXXXXXXXXXXXXXXXXXXXXXXXXXXXXXXXXXXXXXXXXXXXXXXXXXXXXXXXXXXXXXXXXXXXRFAYLFVNINVTSEPHEVSALWFLWYVKQCGGTTRIFSVTNGGQERKFVGGSGQVSERIMDLLGDQVKLNHPVTHVDQSSDNIIIETLNHEHYECKYVINAIPPTLTAKIHFRPELPAERNQLIQRLPMGAVIKCMMYYKEAFWKKKDYCGCMIIEDEDAPISITLDDTKPDGSLPAIMGFILARKADRLAKLHKEIRKKKICELYAKVLGSQEALHPVHYEEKNWCEEQYSGGCYTAYFPPGIMTQYGRVIRQPVGRIFFAGTETATKWSGYMEGAVEAGERAAREVLNGLGKVTEKDIWVQEPESKDVPAVEITHTFWERNLPSVSGLLKIIGFSTSVTALGFVLYKYKLLPRS

SEQ ID NO: 2457 - protein, 663 aa, Homo sapiens
MFDLVDYKNFSASSIAKIGSDPLKLVRDAMEETTDWIYGFFSLLSDIISSEDEEDDDGDEDTDKGEIDEPPLRKKEIHKDKTEKQEKPERKIQTKVTHKEKEKGKEKVREKEKPEKKATHKEKIEKKEKPETKTLAKEQKKAKTAEKSEEKTKKEVKGGKQEKVKQTAAKVKEVQKTPSKPKEKEDKEKAAVSKHEQKDQYAFCRYMIDIFVHGDLKPGQSPAIPPPLPTEQASRPTPASPALEEKEGEKKKAEKKVTSETKKKEKEDIKKKSEKETAIDVEKKEPGKASETKQGTVKIAAQAAAKKDEKKEDSKKTKKPAEVEQPKGKKQEKKEKHVEPAKSPKKEHSVPSDKQVKAKTERAKEEIGAVSIKKAVPGKKEEKTTKTVEQEIRKEKSGKTSSILKDKEPIKGKEEKVPASLKEKEPETKKDEKMSKAGKEVKPKPPQLQGKKEEKPEPQIKKEAKPAISEKVQIHKQDIVKPEKTVSHGKPEEKVLKQVKAVTIEKTAKPKPTKKAEHREREPPSIKTDKPKPTPKGTSEVTESGKKKTEISEKESKEKADMKHLREEKVSTRKESLQLHNVTKAEKPARVSKDVEDVPASKKAKEGTEDVSPTKQKSPISFFQCVYLDGYNGYGFQFPFTPADRPGESSGQANSPGQKQQGQ

SEQ ID NO: 2458 - protein, 1063 aa, Homo sapiens
MPHLPLASFRPPFWGLRHSRGLPRFHSVSTQSEPHGSPISRRNREAKQKRLREKQATLEAEIAGESKSPAESIKAWRPKELVLYEIPTKPGEKKDVSGPLPPAYSPRYVEAAWYPWWVREGFFKPEYQARLPQATGETFSMCIPPPNVTGSLHIGHALTVAIQDALVRWHRMRGDQVLWVPGSDHAGIATQAVVEKQLWKERGVRRHELSREAFLREVWQWKEAKGGEICEQLRALGASLDWDRECFTMDVGSSVAVTEAFVRLYKAGLLYRNHQLVNWSCALRSAISDIEVENRPLPGHTQLRLPGCPTPVSFGLLFSVAFPVDGEPDAEVVVGTTRPETLPGDVAVAVHPDDSRYTHLHGRQLRHPLMGQPLPLITDYAVQPHVGTGAVKVTPAHSPADAEMGARHGLSPLNVIAEDGTMTSLCGDWLQGLHRFVAREKIMSVLSEWGLFRGLQNHPMVLPICSRSGDVIEYLLKNQWFVRCQEMGARAAKAVESGALELSPSFHQKNWQHWFSHIGDWCVSRQLWWGHQIPAYLVVEDHAQGEEDCWVVGRSEAEAREVAAELTGRPGAELTLERDPDVLDTWFSSALFPFSALGWPQETPDLARFYPLSLLETGSDLLLFWVGRMVMLGTQLTGQLPFSKVLLHPMVRDRQGRKMSKSLGNVLDPRDIISGVEMQVLQEKLRSGNLDPAELAIVAAAQKKDFPHGIPECGTDALRFTLCSHGVQAGDLHLSVSEVQSCRHFCNKIWNALRFILNALGEKFVPQPAEELSPSSPMDAWILSRLALAAQECERGFLTRELSLVTHALHHFWLHNLCDVYLEAVKPVLWHSPRPLGPPQVLFSCADLGLRLLAPLMPFLAEELWQRLPPRPGCPPAPSISVAPYPSACSLEHWRQPELERRFSRVQEVVQVLRALRATYQLTKARPRVLLQSSEPGDQGLFEAFLEPLGTLGYCGAVGLLPPGAAAPSGWAQAPLSDTAQVYMELQGLVDPQIQLPLLAARRYKLQKQLDSLTARTPSEGEAGTQRQQKLSSLQLELSKLDKAASHLRQLMDEPPAPGSPEL

SEQ ID NO: 2459 - protein, 933 aa, Homo sapiens
MVPPLAIMERPPPVMVNGRHNYETYLEYISRTSQSVPDITDRPPHSLHSMPTDGQLDGTYPPPVHDDNVSMASSGATQAELMTLTIVKGAQGFGFTIADSPTGQRVKQILDIQGCPGLCEGDLIVEINQQNVQNLSHTEVVDILKDCPIGSETSLIIHRGGFFSPWKTPKPIMDRWENQGSPQTSLSAPAIPQNLPFPPALHRSSFPDSTEAFDPRKPDPYELYEKSRAIYESRQQVPPRTSFRMDSSGPDYKELDVHLRRMESGFGFRILGGDEPGQPILIGAVIAMGSADRDGRLHPGDELVYVDGIPVAGKTHRYVIDLMHHAARNGQVNLTVRRKVLCGGEPCPENGRSPGSVSTHHSSPRSDYATYTNSNHAAPSSNASPPEGFASHSLQTSDVVIHRKENEGFGFVIISSLNRPESGSTITVPHKIGRIIDGSPADRCAKLKVGDRILAVNGQSIINMPHADIVKLIKDAGLSVTLRIIPQEELNSPTSAPSSEKQSPMAQQSPLAQQSPLAQPSPATPNSPIAQPAPPQPLQLQGHENSYRSEVKARQDVKPDIRQPPFTDYRQPPLDYRQPPGGDYQQPPPLDYRQPPLLDYRQHSPDTRQYPLSDYRQPQDFDYFTVDMEKGAKGFGFSIRGGREYKMDLYVLRLAEDGPAIRNGRMRVGDQIIEINGESTRDMTHARAIELIKSGGRRVRLLLKRGTGQVPEYDEPAPWSSPAAAAPGLPEVGVSLDDGLAPFSPSHPAPPSDPSHQISPGPTWDIKREHDVRKPKELSACGQKKQRLGEQRERSASPQRAARPRLEEAPGGQGRPEAGRPASEARAPGLAAADAADAARAGGKEAPRAAAGSELCRREGPGAAPAFAGPGGGGSGALEAEGRAGARAGPRPGPRPPGGAPARKAAVAPGPWKVPGSDKLPSVLKPGASAASR

SEQ ID NO: 2460 - protein, 273 aa, Homo sapiens
MDPGKDKEGVPQPSGPPARKKFVIPLDEDEVPPGVAKPLFRSTQSLPTVDTSAQAAPQTYAEYAISQPLEGAGATCPTGSEPLAGETPNQALKPGAKSNSIIVSPRQRGNPVLKFVRNVPWEFGDVIPDYVLGQSTCALFLSLRYHNLHPDYIHGRLQSLGKNFALRVLLVQVDVKDPQQALKELAKMCILADCTLILAWSPEEAGRYLETYKAYEQKPADLLMEKLEQDFVSRSLEQLIAASREDLALCPGLGPQKARRLFDVLHEPFLKVP

SEQ ID NO: 2461 - protein, 223 aa, Homo sapiens
MPKKFQGENTKSAAARARRAEAKAAADAKKQKELEDAYWKDDDKHVMRKEQRKEEKEKRRLDQLERKKETQRLLEEEDSKLKGGKAPRVATSSKVTRAQIEDTLRRDHQLREAPDTAEKAKSHLEVPLEENVNRRVLEEGSVEARTIEDAIAVLSVAEEAADRHPERRMRAAFTAFEEAQLPRLKQENPNMRLSQLKQLLKKEWLRSPDNPMNQRAVPFNAPK

SEQ ID NO: 2462 - protein, 2527 aa, Homo sapiens
MVQALTELLRRAQAPQAPRSRACEPSTPRRSRGRPPGRPAGPCRRKQQAVVVAEAAVTIPKPEPPPPVVPVKHQTGSWKCKEGPGPGPGTPRRGGQSSRGGRGGRGRGRGGGLPFVIKFVSRAKKVKMGQLSLGLESGQGQGQHEESWQDVPQRRVGSGQGGSPCWKKQEQKLDDEEEEKKEEEEKDKEGEEKEERAVAEEMMPAAEKEEAKLPPPPLTPPAPSPPPPLPPPSTSPPPPLCPPPPPPVSPPPLPSPPPPPAQEEQEESPPPVVPATCSRKRGRPPLTPSQRAEREAARAGPEGTSPPTPTPSTATGGPPEDSPTVAPKSTTFLKNIRQFIMPVVSARSSRVIKTPRRFMDEDPPKPPKVEVSPVLRPPITTSPPVPQEPAPVPSPPRAPTPPSTPVPLPEKRRSILREPTFRWTSLTRELPPPPPAPPPPPAPSPPPAPATSSRRPLLLRAPQFTPSEAHLKIYESVLTPPPLGAPEAPEPEPPPADDSPAEPEPRAVGRTNHLSLPRFAPVVTTPVKAEVSPHGAPALSNGPQTQAQLLQPLQALQTQLLPQALPPPQPQLQPPPSPQQMPPLEKARIAGVGSLPLSGVEEKMFSLLKRAKVQLFKIDQQQQQKVAASMPLSPGGQMEEVAGAVKQISDRGPVRSEDESVEAKRERPSGPESPVQGPRIKHVCRHAAVALGQARAMVPEDVPRLSALPLRDRQDLATEDTSSASETESVPSRSRRGKVEAAGPGGESEPTGSGGTLAHTPRRSLPSHHGKKMRMARCGHCRGCLRVQDCGSCVNCLDKPKFGGPNTKKQCCVYRKCDKIEARKMERLAKKGRTIVKTLLPWDSDESPEASPGPPGPRRGAGAGGPREEVVAHPGPEEQDSLLQRKSARRCVKQRPSYDIFEDSDDSEPGGPPAPRRRTPRENELPLPEPEEQSRPRKPTLQPVLQLKARRRLDKDALAPGPFASFPNGWTGKQKSPDGVHRVRVDFKEDCDLENVWLMGGLSVLTSVPGGPPMVCLLCASKGLHELVFCQVCCDPFHPFCLEEAERPLPQHHDTWCCRRCKFCHVCGRKGRGSKHLLECERCRHAYHPACLGPSYPTRATRKRRHWICSACVRCKSCGATPGKNWDVEWSGDYSLCPRCTQLYEKGNYCPICTRCYEDNDYESKMMQCAQCDHWVHAKCEGLSDEDYEILSGLPDSVLYTCGPCAGAAQPRWREALSGALQGGLRQVLQGLLSSKVVGPLLLCTQCGPDGKQLHPGPCGLQAVSQRFEDGHYKSVHSFMEDMVGILMRHSEEGETPDRRAGGQMKGLLLKLLESAFGWFDAHDPKYWRRSTRLPNGVLPNAVLPPSLDHVYAQWRQQEPETPESGQPPGDPSAAFQGKDPAAFSHLEDPRQCALCLKYGDADSKEAGRLLYIGQNEWTHVNCAIWSAEVFEENDGSLKNVHAAVARGRQMRCELCLKPGATVGCCLSSCLSNFHFMCARASYCIFQDDKKVFCQKHTDLLDGKEIVNPDGFDVLRRVYVDFEGINFKRKFLTGLEPDAINVLIGSIRIDSLGTLSDLSDCEGRLFPIGYQCSRLYWSTVDARRRCWYRCRILEYRPWGPREEPAHLEAAEENQTIVHSPAPSSEPPGGEDPPLDTDVLVPGAPERHSPIQNLDPPLRPDSGSAPPPAPRSFSGARIKVPNYSPSRRPLGGVSFGPLPSPGSPSSLTHHIPTVGDPDFPAPPRRSRRPSPLAPRPPPSRWASPPLKTSPQLRVPPPTSVVTALTPTSGELAPPGPAPSPPPPEDLGPDFEDMEVVSGLSAADLDFAASLLGTEPFQEEIVAAGAMGSSHGGPGDSSEEESSPTSRYIHFPVTVVSAPGLAPSATPGAPRIEQLDGVDDGTDSEAEAVQQPRGQGTPPSGPGVVRAGVLGAAGDRARPPEDLPSEIVDFVLKNLGGPGDGGAGPREESLPPAPPLANGSQPSQGLTASPADPTRTFAWLPGAPGVRVLSLGPAPEPPKPATSKIILVNKLGQVFVKMAGEGEPVPPPVKQPPLPPTISPTAPTSWTLPPGPLLGVLPVVGVVRPAPPPPPPPLTLVLSSGPASPPRQAIRVKRVSTFSGRSPPAPPPYKAPRLDEDGEASEDTPQVPGLGSGGFSRVRMKTPTVRGVLDLDRPGEPAGEESPGPLQERSPLLPLPEDGPPQVPDGPPDLLLESQWHHYSGEASSSEEEPPSPDDKENQAPKRTGPHLRFEISSEDGFSVEAESLEGAWRTLIEKVQEARGHARLRHLSFSGMSGARLLGIHHDAVIFLAEQLPGAQRCQHYKFRYHQQGEGQEEPPLNPHGAARAEVYLRKCTFDMFNFLASQHRVLPEGATCDEEEDEVQLRSTRRATSLELPMAMRFRHLKKTSKEAVGVYRSAIHGRGLFCKRNIDAGEMVIEYSGIVIRSVLTDKREKFYDGKGIGCYMFRMDDFDVVDATMHGNAARFINHSCEPNCFSRVIHVEGQKHIVIFALRRILRGEELTYDYKFPIEDASNKLPCNCGAKRCRRFLN

SEQ ID NO: 2463 - protein, 740 aa, Homo sapiens
MNEHLSSLIKKKRKCMQPKDFNFKTPENDKRFQKKFEKMAKELQRQKTNLDDDVPILLFESNGSLIYTPTIEINSSHHSAMEKRLQEMKEKRENLSPTSSQMIQQSHDNPSNSLCETPLNISRDTLCSDEYFAGGLHSSFDDLCGNSGCGNQERKLEGSINDIKSDVCISSLVLKANNIHSSPSFTHLDKSSPQKFLSNLSKEEINLQRNIAGKVVTPDQKQAAGMSQETFEEKYRLSPTLSSTKGHLLIHSRPRSSSVKRKRVSHGSHSPPKEKCKRKRSTRRSIMPRLQLCRSEGRLQHVAGPALEALSCGESSYDDYFSPDNLKERYSENLPPESQLPSSPAQLSCRSLSKKERTSIFEMSDFSCVGKKTRTVDITNFTAKTISSPRKTGNGEGRATSSCVTSAPEEALRCCRQAGKEDACPEGNGFSYTIEDPALPKGHDDDLTPLEGSLEEMKEAVGLKSTQNKGTTSKISNSSEGEAQSEHEPCFIVDCNMETSTEEKENLPGGYSGSVKNRPTRHDVLDDSCDGFKDLIKPHEELKKSGRGKKPTRTLVMTSMPSEKQNVVIQVVDKLKGFSIAPDVCETTTHVLSGKPLRTLNVLLGIARGCWVLSYDWVLWSLELGHWISEEPFELSHHFPAAPLCRSECHLSAGPYRGTLFADQPAMFVSPASSPPVAKLCELVHLCGGRVSQVPRQASIVIGPYSGKKKATVKYLSEKWVLDSITQHKVCAPENYLLSQ

SEQ ID NO: 2464 - protein, 491 aa, Homo sapiens
MVVFLSCQLFHKEVLRQSISHKYLMRGPCLPYTSKLVKTLLYNFIRQEKPPPPGAHVFPQQSDGGGLLYGLASGVATGLWTVFTLGGVGSKAAASPELSSPLANQSLLLLLVLANLTDASDAPNPYRQAIMSFKNTQDSSPFPSSIPHAFQINFNSLYTALCEQQTSDQATLLLYTLLHQNSNIRTYMLARTDMENLVLPILEILYHVEERNSHHVYMALIILLILTEDDGFNRSIHEVILKNITWYSERVLTEISLGSLLILVVIRTIQYNMTRTRDKYLHTNCLAALANMSAQFRSLHQYAAQRIISLFSLLSKKHNKVLEQATQSLRGSLSSNDVPLPDYAQDLNVIEEVIRMMLEIINSCLTNSLHHNPNLVYALLYKRDLFEQFRTHPSFQDIMQNIDLVISFFSSRLLQAGAELSVERVLEIIKQGVVALPKDRLKKFPELKFKYVEEEQPEEFFIPYVWSLVYNSAVGLYWNPQDIQLFTMDSD

SEQ ID NO: 2465 - protein, 311 aa, Homo sapiens
MAQPPVHDYVPVSWTALVHVKAEYFRSLAHYHVAMALCDGSRECPPHLPMVLPRPPRAGSQPLCPPAATEGELPTHEQVFLQPPTSSKPRGPVLPQELEERRQLGKAHLKRAILGQEEALRLHALCRVLREVDLLRAVISQTLQRSLAKYAELDREDDFCEAAEAPDIQPKTHQKPEARMPRLSQGKGPDIFHRLGPLSVFSAKNRWRLVGPVHLTRGEGGFGLTLRGDSPVLIAAVIPGSQAAAAGLKEGDYIVSVNGQPCRWWRHAEVVTELKAAGEAGASLQVVSLLPSSRLPSLGDRRPVLLGPGRL

SEQ ID NO: 2466 - protein, 941 aa, Homo sapiens
MASPRSSGQPGPPPPPPPPPARLLLLLLLPLLLPLAPGAWGWARGAPRPPPSSPPLSIMGLMPLTKEVAKGSIGRGVLPAVELAIEQIRNESLLRPYFLDLRLYDTECDNAKGLKAFYDAIKYGPNHLMVFGGVCPSVTSIIAESLQGWNLVQLSFAATTPVLADKKKYPYFFRTVPSDNAVNPAILKLLKHYQWKRVGTLTQDVQRFSEVRNDLTGVLYGEDIEISDTESFSNDPCTSVKKLKGNDVRIILGQFDQNMAAKVFCCAYEENMYGSKYQWIIPGWYEPSWWEQVHTEANSSRCLRKNLLAAMEGYIGVDFEPLSSKQIKTISGKTPQQYEREYNNKRSGVGPSKFHGYAYDGIWVIAKTLQRAMETLHASSRHQRIQDFNYTDHTLGRIILNAMNETNFFGVTGQVVFRNGERMGTIKFTQFQDSREVKVGEYNAVADTLEIINDTIRFQGSEPPKDKTIILEQLRKISLPLYSILSALTILGMIMASAFLFFNIKNRNQKLIKMSSPYMNNLIILGGMLSYASIFLFGLDGSFVSEKTFETLCTVRTWILTVGYTTAFGAMFAKTWRVHAIFKNVKMKKKIIKDQKLLVIVGGMLLIDLCILICWQAVDPLRRTVEKYSMEPDPAGRDISIRPLLEHCENTHMTIWLGIVYAYKGLLMLFGCFLAWETRNVSIPALNDSKYIGMSVYNVGIMCIIGAAVSFLTRDQPNVQFCIVALVIIFCSTITLCLVFVPKLITLRTNPDAATQNRRFQFTQNQKKEDSKTSTSVTSVNQASTSRLEGLQSENHRLRMKITELDKDLEEVTMQLQDTPEKTTYIKQNHYQELNDILNLGNFTESTDGGKAILKNHLDQNPQLQWNTTEPSRTCKDPIEDINSPEHIQRRLSLQLPILHHAYLPSIGGVDASCVSPCVSPTASPRHRHVPPSFRVMVSGL

SEQ ID NO: 2467 - protein, 452 aa, Homo sapiens
MAGYLRVVRSLCRASGSRPAWAPAALTAPTSQEQPRRHYADKRIKVAKPVVEMDGDEMTRIIWQFIKEKLILPHVDIQLKYFDLGLPNRDQTDDQVTIDSALATQKYSVAVKCATITPDEARVEEFKLKKMWKSPNGTIRNILGGTVFREPIICKNIPRLVPGWTKPITIGRHAHGDQYKATDFVADRAGTFKMVFTPKDGSGVKEWEVYNFPAGGVGMGMYNTDESISGFAHSCFQYAIQKKWPLYMSTKNTILKAYDGRFKDIFQEIFDKHYKTDFDKNKIWYEHRLIDDMVAQVLKSSGGFVWACKNYDGDVQSDILAQGFGSLGLMTSVLVCPDGKTIEAEAAHGTVTRHYREHQKGRPTSTNPIASIFAWTRGLEHRGKLDGNQDLIRFAQMLEKVCVETVESGAMTKDLAGCIHGLSNVKLNEHFLNTTDFLDTIKSNLDRALGRQ

SEQ ID NO: 2468 - protein, 97 aa, Homo sapiens
  VARIANT 71, 72, 73, 74, 75, 76, 77, 78, 79, 80, 81, 82, 83, 84, 85: Xaa = Any Amino Acid
MALPLRPLTRGLASAAKGGHGGAGARTWRLLTFVLALPSVALCTFNSYLHSGHRPRPEFRPYQHLRIRTKXXXXXXXXXXXXXXXHVNPLPTGYEHP

SEQ ID NO: 2469 - protein, 87 aa, Homo sapiens
GACCRKWEERKVVMAAIAASEVLVDSAEEGSLAAAAELAAQKREQRLRKFRELHLMRVSSLGGRLRSVIWPSLCAFVEGTRKPHHCV

SEQ ID NO: 2470 - protein, 479 aa, Homo sapiens
MAAAREPELPQEAPATEPAPPPACRFFLEGRCRFGARCRQPHPGAPAPPGREAQPEAGAKKPPLRTAADVIQRIRWDPRLDPADFSVGYVDRFLGVREEPFSAFCWDQPLAALGPGVLAVPQHRVRFFRFHGRLVWDRASRTDLVFGSGSAAGRGPTILDAPNTEGAHGAEGAEWTLAGTGQEAQAAPKRGSTRPLCTGHQEPGVEEPGELEAAQERALGTAADLGTLAPRGRLAGVTEEALKPTAATRTTLLGGKEAQALGVPGGSAETTEAEWGPAAWPEDKRARLSVAAPCQPRPTHFVALMVTEPGLQAEVTKAQEYLVHVAPHCANFLVPSQNLHLTLALLRLAGAGEEAAAIGALRRALLAPGLNAPPRLSFRKLVLLGPHVLCAPPSPTLESMAQVLSQRLEAEGLSTLQSPGQLHPHLTVAKVPHGSQVHLPKLEFTLSQEVGCQPLQTLWLCRIGRTGGPFQPLAEIRLE

SEQ ID NO: 2471 - protein, 801 aa, Homo sapiens
MWTSGRMSNAKNWLGLGMSLYFWGLMDLTTTVLSDTPTPQGELEALLSDKPQSHQRTKRSWVWNQFFVLEEYTGTDPLYVGKLHSDMDRGDGSIKYILSGEGAGIVFTIDDTTGDIHAIQRLDREERAQYTLRAQALDRRTGRPMEPESEFIIKIQDINDNEPKFLDGPYVATVPEMSPVGTSVIQVTATDADDPTYGNSARVVYSILQGQPYFSVDSKTGVIRTALMNMDREAKEYYEVIIQAKDMGGQLGGLAGTTTVNITLSDVNDNPPRFPQKHYQMSVLESAPISSTVGRVFAKDLDEGINAEMKYTIVDGDGADAFDISTDPNFQVGIITVKKPLSFESKKSYTLKVEGANPHLEMRFLNLGPFQDTTTVHISVEDVDEPPVFEPGFYFVEVPEDVAIGTTIQIISAKDPDVTNNSIRYSIDRSSDPGRFFYVDITTGALMTARPLDREEFSWHNITVLAMEMNNPSQVGSVPVTIKVLDVNDNAPEFPRFYEAFVCENAKAGQLIQTVSAVDQDDPRNGQHFYYSLAPEAANNPNFTIRDNQDNTARILTRRSGFRQQEQSVFHLPILIADSGQPVLSSTGTLTIQVCSCDDDGHVMSCSPEAYMLPVSLSRGALIAILACIFVLLVLVLLILSMRRHRKQPYIIDDEENIHENIVRYDDEGGGEEDTEAFDIAAMWNPREAQAGAAPKTRQDMLPEIESLSRYVPQTCAVNSTVHSYVLAKLYEADMDLWAPPFDSLQTYMFEGDGSVAGSLSSLQSATSDSEQSFDFLTDWGPRFRKLAELYGASEGPAPLW

SEQ ID NO: 2472 - protein, 194 aa, Homo sapiens
AGARRLELGEALALGSGWRHACHALLYAPDPGMLFGRIPLRYAILMQMRFDGRLGFPGGFVDTQDRSLEDGLNRELREELGEAAAAFRVERTDYRSSHVGSGPRVVAHFYAKRLTLEELLAVEAGATRAKDHGLEVLGLVRVPLYTLRDGVGGLPTFLENSFIGSAREQLLEALQDLGLLQSGSISGLKIPAHH

SEQ ID NO: 2473 - protein, 339 aa, Homo sapiens [sequence omitted]

SEQ ID NO: 2474 - protein, 314 aa, Homo sapiens
MALAARLWRLLPFRRGAAPGSRLPAGTSGSRGHCGPCRFRGFEVMGNPGTFKRGLLLSALSYLGFETYQVISQAAVVHATAKVEEILEQADYLYESGETEKLYQLLTQYKESEDAELLWRLARASRDVAQLSRTSEEEKKLLVYEALEYAKRALEKNESSFASHKWYAICLSDVGDYEGIKAKIANAYIIKEHFEKAIELNPKDATSIHLMGIWCYTFAEMPWYQRRIAKMLFATPPSSTYEKALGYFHRAEQVDPNFYSKNLLLLGKTYLKLHNKKLAAFWLMKAKDYPAHTEEDKQIQTEAAQLLTSFSEKN

SEQ ID NO: 2475 - protein, 116 aa, Homo sapiens
MASTVVAVGLTIAAAGFAGRYVLQAMKHMEPQVKQVFQSLPKSAFSGGYYRGGFEPKMTKREAALILGVSPTANKGKIRDAHRRIMLLNHPDKGGSPYIAAKINEAKDLLEGQAKK

SEQ ID NO: 2476 - protein, 31 aa, Homo sapiens
KEQGTAGGKRHFTFQCKSCSFDLMGCTGARG

SEQ ID NO: 2477 - protein, 702 aa, Homo sapiens
ENMQKALELKAKYESDMVTGGYAALINLCCRHDKVEDALNLKEEFDRLDSSAVLDTGKYVGLVRVLAKHGKLQDAINILKEMKEKDVLIKDTTALSFFHMLNGAALRGEIETVKQLHEAIVTLGLAEPSTNISFPLVTVHLEKGDLSTALEVAIDCYEKYKVLPRIHDVLCKLVEKGETDLIQKAMDFVSQEQGEMVMLYDLFFAFLQTGNYKEAKKIIETPGIRARSARLQWFCDRCVANNQVETLEKLVELTQKLFECDRDQMYYNLLKLYKINGDWQRADAVWNKIQEENVIPREKTLRLLAEILREGNQEVPFDVPELWYEDEKHSLNSSSASTTEPDFQKDILIACRLNQKKGAYDIFLNAKEQNIVFNAETYSNLIKLLMSEDYFTQAMEVKAFAETHIKGFTLNDAANSRLIITQVRRDYLKEAVTTLKTVLDQQQTPSRLAVTRVIQALAMKGDVENIEVVQKMLNGLEDSIGLSKMVFINNIALAQIKNNNIDAAIENIENMLTSENKVIEPQYFGLAYLFRKVIEEQLEPAVEKISIMAERLANQFAIYKPVTDFFLQLVDAGKVDDARALLQRCGAIAEQTPILLLFLLRNSRKQGKASTVKSVLELIPELNEKEEAYNSLMKSYVSEKDVTSAKALYEHLTAKNTKLDDLFLKRYASLLKYAGEPVPFIEPPESFEFYAQQLRKLRENSS

SEQ ID NO: 2478 - protein, 542 aa, Homo sapiens
MVAHDETGGLLPIKRTIRVLDVNNQSFREQEEPSNKRVRPLARVTSLANLISPVRNGAVRRFGQTIQSFTLRGDHRSPASAQKFSSRSTVPTPAKRRSSALWSEMLDITMKESLTTREIRRQEAIYEMSRGEQDLIEDLKLARKAYHDPMLKLSIMSEEELTHIFGDLDSYIPLHEDLLTRIGEATKPDGTVEQIGHILVSWLPRLNAYRGYCSNQLAAKALLDQKKQDPRVQDFLQRCLESPFSRKLDLWSFLDIPRSRLVKYPLLLKEILKHTPKEHPDVQLLEDAILIIQGVLSDINLKKGESECQYYIDKLEYLDEKQRDPRIEASKVLLCHGELRSKSGHKLYIFLFQDILVLTRPVTRNERHSYQVYRQPIPVQELVLEDLQDGDVRMGGSFRGAFSNSEKAKNIFRIRFHDPSPAQSHTLQANDVFHKQQWFNCIRAAIAPFQSAGSPPELQGLPELHEECEGNHPSARKLTAQRRASTVSSVTQVEVDENAYRCGSGMQMAEDSKSLKTHQTQPGIRRARDKALSGGKRKETLV

SEQ ID NO: 2479 - protein, 278 aa, Homo sapiens
MGKSSEWCERIAGIQKFVLEKWTKKAKPEDTLNLCQLLNNDLASTVVSYPRRFVGLGTLPMQAPELAVKEMERCVKELGFPGVQIGTHVNEWDLNAQELFPVYAAAERLKCSLFVHPWDMQMDGRMAKYWLPWLVGMPAETTIAICSMIMGGVFEKFPKLKVCFAHGGGAFPFTVGRISHGFSMRPDLCAQDNPMNPKKYLGSFYTDALVHDPLSLKLLTDVIGKDKVILGTDYPFPLGELEPGKLIESMEEFDEETKNKLKAGNALAFLGLERKQFE

SEQ ID NO: 2480 - protein, 705 aa, Homo sapiens
MPLPGGLWWLLCCRRGFTLLHRDYGDGELSGDGDEDEDEETFELRTPSPAGGGRGPLEVTLTQPVRSGPVSNRLQSWEETWSLIPEKGLPEDDPDIVVKGWLYREPRGGGARPWLPPRRAWFVLTRDSLDQFSSSGKGARRLGSLVLTSLCSVTGPERRRKETGLWSVTVSGRKHSVRLCSPRQAEAERWGVALREVIASKAPLETPTQLLLRDIQESCGDPEAVALIYLRNPILRHTSGALYAPLLPLPYGVSAPGPGYAPLREEAVRLFLALQALEGARRPGPLMQGVLQTCRDLPALRDELFLQLAKQTSGPAGPPGLPATQDPAALRYWQLLTCMSCTFRPGGAVRGHLLGHLERTEQALPDSELAEYARFIRKALGRTRGRELVPSLAEISALSQRQELLCTVHCPGAGACAVAIDSHTTAGEVARELVGRLGLARSRNAFALYEQRGAQERALAGGTLVADVLTRFENLAAEEAGLEDSPDSGWRLCLRLHGPLHPEGLSPDGHELPFLFEQAHALLLRGRPPPPDDTLRALAALRLQSLHRDFSPRVPLPRLDRLLPPPAPPREDPPRPTPRPPPSAALLAGALWSPGLAKRRAERARRGGAGRTAGSIAREGGGGAGTAAAVLGGWKRLRGMGRAEAMAAYLALAAQCPGFGAARSLVGVLHRSCAWAWEPRPCPSPGQGRRSPSTVSAMAMWPPAS

SEQ ID NO: 2481 - protein, 434 aa, Homo sapiens
MLRCLYHWHRPVLNRRWSRLCLLKQYLFTMKLQSPEFQSLFTEGLKSLTELFVKENHELRIAGGAVRDLLNGVKPQDIDFATTATPTQMKEMFQSAGIRMINNRGEKHGTITARLHEENFEITTLRIDVTTDGRHAEVEFTTDWQKDAERRDLTINSMFLGFDGTLFDYFNGYEDLKNKKVRFVGHAKQRIQEDYLRILRYFRFYGRIVDKPGDHDPETLEAIAENAKGLAGISGERIWVELKKILVGNHVNHLIHLIYDLDVAPYIGLPANASLEEFDKVSKNVDGFSPKPVTLLASLFKVQDDVTKLDLRLKIAKEEKNLGLFIVKNRKDLIKATDSSDPLKPYQDFIIDSREPDATTRVCELLKYQGEHCLLKEMQQWSIPPFPVSGHDIRKVGISSGKEIGALLQQLREQWKKSGYQMEKDELLSYIKKT

SEQ ID NO: 2482 - protein, 52 aa, Homo sapiens
MTDTENHDSAPSSTSTCCPPITAGMQLKDSLGPGSNRPLWTLRPLHLRVVCL

SEQ ID NO: 2483 - protein, 640 aa, Homo sapiens
MGERTLHAAVPTPGYPESESIMMAPICLVENQEEQLTVNSKALEILDKISQPVVVVAIVGLYRTGKSYLMNRLAGKRNGFPLGSTVQSETKGIWMWCVPHLSKPNHTLVLLDTEGLGDVEKSNPKNDSWIFALAVLLSSSFVYNSVSTINHQALEQLHYVTELAELIRAKSCPRPDEAEDSSEFASFFPDFIWTVRDFTLELKLDGNPITEDEYLENALKLIPGKNPKIQNSNMPRECIRHFFRKRKCFVFDRPTNDKQYLNHMDEVPEENLERHFLMQSDNFCSYIFTHAKTKTLREGIIVTGKRLGTLVVTYVDAINSGAVPCLENAVTALAQLENPAAVQRAADHYSQQMAQQLRLPTDTLQELLDVHAACEREAIAVFMEHSFKDENHEFQKKLVDTIEKKKGDFVLQNEEASAKYCQAELKRLSEHLTESILRGIFSVPGGHNLYLEEKKQVEWDYKLVPRKGVKANEVLQNFLQSQVVVEESILQSDKALTAGEKAIAAERAMKEAAEKEQELLREKQKEQQQMMEAQERSFQENIAQLKKKMERERENLLREHERLLKHKLKVQEEMLKEEFQKKSEQLNKEINQLKEKIESTKNEQLRLLKILDMASNIMIVTLPGASKLLGVGTKYLGSRI

SEQ ID NO: 2484 - protein, 472 aa, Homo sapiens
MKCKAYTDCLSQNLVVIKPGTKETDNVCGTLPSFSSSTSPSPGTAIFPRPEHMETHEVPSSTYVPKGMNSTESNSSASVRPKVLSSIQEGTVPDNTSSARGKEDVNKTLPNLQVVNHQQGPHHRHILKLLPSMEATGGEKSSTPIKGPKRGHPRQNLHKHFDINEHLPWMIVLFLLLVLVVIVVCSIRKSSRTLKKGPRQDPSAIVEKAGLKKSMTPTQNREKWIYYCNGHGIDILKLVAAQVGSQWKDIYQFLCNASEREVAAFSNGYTADHERAYAALQHWTIRGPEASLAQLISALRQHRRNDVVEKIRGLMEDTTQLETDKLALPMSPSPLSPSPIPSPNAKLENSALLTVEPSPQDKNKGFFVDESEPLLRCDSTSSGSSALSRNGSFITKEKKDTVLRQVRLDPCDLQPIFDDMLHFLNPEELRVIEEIPQAEDKLDRLFEIIGVKSQEASQTLLDSVYSHLPDLL

SEQ ID NO: 2485 - protein, 234 aa, Homo sapiens
MAFLAGPRLLDWASSPPHLQFNKFVLTGYRPASSGSGCLRSLFYLHNELGNIYTHGSVLYHLFMCHQGGSAVYARLLALDMCGVCLVNTLGALPIIHCTLACRPWLRPAALVGYTVLSGVAGWRALTAPSTSARLRAFGWQAAARLLVFEARGVGLGSGAPGSLPCYLRMDALALLGGLVNVARLPERWGPGRFDYWGNSHQIMHLLSVGSILQLHAGVVPDLLWAAHHACPRD

SEQ ID NO: 2486 - protein, 411 aa, Homo sapiens
MQVEEATGQAAGRRRGNVVRRVFGRIRRFFSRRRNEPTLPREFTRRGRRGAVSVDSLAELEDGALLLQTLQLSKISFPIGQRLLGSKRKMSLNPIAKQIPQVVEACCQFIEKHGLSAVGIFTLEYSVQRVRQLREEFDQGLDVVLDDNQNVHDVAALLKEFFRDMKDSLLPDDLYMSFLLTATLKPQDQLSALQLLVYLMPPCHSDTLERLLKALHKITENCEDSIGIDGQLVPGNRMTSTNLALVFGSALLKKGKFGKRESRKTKLGIDHYVASVNVVRAMIDNWDVLFQVPPHIQRQVAKRVWKSSPEALDFIRRRNLRKIQSARIKMEEDALLSDPVETSAEARAAVLAQSKPSDEGSSEEPAVPSGTARSHDDEEGAGNPPIPEQDRPLLRVPREKEAKTGVSYFFP

SEQ ID NO: 2487 - protein, 372 aa, Homo sapiens [sequence omitted]

SEQ ID NO: 2488 - protein, 539 aa, Homo sapiens
MSLSDKQTASLTAAYGQLSKGKPAECRMDSPKEISQAGFEWQRTEGKLNEIGLNVSMDGQPKDGLVKNASFLEQNKLCFFEGKLDKELSIEMQDKDCQEASGHLESRYVISETCHPLEGNSVHQKTSEFHLGLIEGPDKNKTIPVQGKVAGKNGLETKSQSDLDFPGAADIPTRYVKEQETSVWNPSFHPVAQGSLGSREATPGEMENSITPGCPVIGVVNDNSEQLKCESPLLVSLAHPAPIIEHSPTTIPPITMVFTQEHLNASCHIRDHDKELEKLSSTEEAVLNQAPQQKKAVRRALSECSHLSVPPAVNLADKYPELPAREEPSSGLLPPPSSPMPSPTPGKLGAPAMKRSMTVGEEQTASYKLSPGKLPILSTKEIPPFICEEPVAKKREELAHFSNSSSNSGKKELGTAGLYLHSKLEQIPEGSSKEKGQEDFSETRIDSCSQVCQRGEKQPGQTALAGKKEIEVTATQSTPSFLFEKPPRDGIARPEEGRPVVSGTGNDITTPPNKELPPSPEKKTKVGARMVVIFYCHNF

SEQ ID NO: 2489 - protein, 135 aa, Homo sapiens
MFRPFVEVCILGPNLGDKKRKQGTKTKSNTWSPKYNETFQFILGKENRPGAYELHLSVKDYCFAREDRIIGMTVIQLQNIAEKGSYGAWYPLLKNISMDETGLTILRILSQRTSDDVAKEFVRLKSETRSTEESA

SEQ ID NO: 2490 - protein, 811 aa, Homo sapiens
METSSMLSSLNDECKSDNYIEPHYKEWYRVAIDILIEHGLEAYQEFLVQERVSDFLAEEEINYILKNVQKVAQSTAHGTDDSCDDTLSSGTYWPVESDVEAPNLDLGWPYVMPGLLGGTHIDLLFHPPRAHLLTIKETIRKMIKEARKVIALVMDIFTDVDIFKEIVEASTRGVSVYILLDESNFNHFLNMTEKQGCSVQRLRNIRVRTVKGQDYLSKTGAKFHGKMEQKFLLVDCQKVMYGSYSYMWSFEKAHLSMVQIITGQLVESFDEEFRTLYARSCVPSSFAQEESARVKHGKALWENGTYQHSVSSLASVSSQRNLFGRQDKIHKLDSSYFKNRGIYTLNEHGKYNIRSHGYKPHFVPNFNGPNAIRQFQPNQINENWKRHSYAGEQPETVPYLLLNRALNRTNNPPGNWEKPSDSLSVASSSREGYVSHHNTPAQSFANRLAQRKTTNLADRNSNVRRSFNGTDNHIRFLQQRMPTLEHTTKSFLRNWRIESYLNDHSEATPDSNGSALGDRFEGYDNPENLKANALYTHSRLSSSLVFKPTLPEQKEVNSCTTGSSNSTIIGSQGSETPKEVPDTPTNVQHLTDKPLPESIPKLPLQSEAPKMHTLQVPENHSVALNQTTNGHTESNNYIYKTLGVNKQTENLKNQQTENLLKRRSFPLFDNSKANLDPGNSKHYVYSTLTRNRVRQPEKPKEDLLKSSKSMHNVTHNLEEDEEEVTKRNSPSGTTTKSVSIAALLDVNKEESNKELASKKEVKGSPSFLKKGSQKLRSLLSLTPDKKENLSKNKAPAFYRLCSSSDTLVSEG

SEQ ID NO: 2491 - protein, 473 aa, Homo sapiens
MASRSLGGLSGIRGGGGGGGKKSLSARNAAVERRNLITVCRFSVKTLIDRSCFETIDDSSPEFNNFAAILEQILSHRLKEISQSCRWLAHLQIPLQGQVTWFGYESPRSFWDYIRVACRKVSQNCICSIENMENVSSSRAKGRAWIRVALMEKHLSEYISTALRDFKTTRRFYEDGAIVLGEEANMLAGMLLGLNAIDFSFCLKGEGLDGSFPAVIDYTPYLKYIQSSDSISSDEEELRTLGSSGSESSTPENVGPPFLMDENSWFNKCKRVKQKYQLTLEQKGYLEELLRLRENQLSESVSQNKILLQRIEDSDLAHKLEKEQLEYIIVELQDQLTVLKNNDLRSRQELTAHLTNQWPSPGALDVNAVALDTLLYRKHNKQWYEKSYQSLDQLSAEVSLSQTSLDPGQSQEGDGKQDTLNVMSEGKEDTPSLLGLCGSLTSVASYKSLTSLKSNDYLASPTTEMTSPGLTPS

SEQ ID NO: 2492 - protein, 272 aa, Homo sapiens
MQWNVPRTVSRLARRTCLEPHNAGLFGHCQNVKGPLLLYNAESKVVLVRGPQKQWLHLSAAQCVAKERRPLDAHPPQPGVLRHKQGKQHVSFRRVFSSSATAQGTPEKKEEPDPLQDKSISLYQRFKKTFRQYGKVLIPVHLITSGVWFGTFYYAALKGVNVVPFLELIGLPDSVVSILKNSQSGNALTAYALFKIATPARYTVTLGGTSVTVKYLRSHGYMSTPPPVKEYLQDRMEETKELITEKMEETKDRLTEKLQETKEKVSFKKKVE

SEQ ID NO: 2493 - protein, 295 aa, Homo sapiens
MRHSVARPTRLPRRLSPFWDPATCKNLEGGAGEVVRGRDPRRLRTSRSTEILGEGLAGPSAGAAARPAAPPPQPREPGAPGLRRAPPRTRMDSSGLGPCSEAPLHTSAGLSGRNLRAAGGVLPVDLERERAALCARQSGHGPPAVRWLLGSRGAESGGLARRRVAAEHAQPSANLVCRSALETSAFPPSKPKSPRGRVRARSSDGRLRHPAWRAGSGGRGGRGPSAELASRYWGRRRALPGAADLRPKGARADDRRPLRAGRKLHLPEAARLPGNVGKSGEPHKAGEVGNHPRDS

SEQ ID NO: 2494 - protein, 532 aa, Homo sapiens
MAPSFTARIQLFLLRALGFLIGLVGRAALVLGGPKFASKTPRPVTEPLLLLSGMQLAKLIRQRKVKCIDVVQAYINRIKDVNPMINGIVKYRFEEAMREAHAVDQKLAEKQEDEATLENKWPFLGVPLTVKEAFQLQGMPNSSGLMNRRDAIAKTDATVVALLKGAGAIPLGITNCSELCMWYESSNKIYGRSNNPYDLQHIVGGSSGGEGCTLAAACSVIGVGSDIGGSIRMPAFFNGIFGHKPSPGVVPNKGQFPLAVGAQELFLCTGPMCRYAEDLAPMLKVMAGPGIKRLKLDTKVHLKDLKFYWMEHDGGSFLMSKVDQDLIMTQKKVVVHLETILGASVQHVKLKKMKYSFQLWIAMMSAKGHDGKEPVKFVDLLGDHGKHVSPLWELIKWCLGLSVYTIPSIGLALLEEKLRYSNEKYQKFKAVEESLRKELVDMLGDDGVFLYPSHPTVAPKHHVPLTRPFNFAYTGVFSALGLPVTQCPLGLNAKGLPLGIQVVAGPFNDHLTLAVAQYLEKTFGGWVCPGKF

SEQ ID NO: 2495 - protein, 380 aa, Homo sapiens
MAEAMKLQKMKLMAMNTLQGNGSQNGTESEPDDLNSNTGGSESSWDKDKMQSPFAAPGPQHGIAHAALAGQPGIGGAPTLNPLQQNHLLTNRLDLPFMMMPHPLLPVSLPPASVAMAMNQMNHLNTIANMAAAAQIHSPLSRAGTSVIKERIPESPSPAPSLEENHRPGSQTSSHTSSSVSSSPSQMDHHLERMEEVPVQIPIMKSPLDKIQLTPGQALPAGFPGPFIFADSLSSVETLLTNIQGLLKVALDNARIQEKQIQQEKKELRLELYREREIRENLERQLAVELQSRTTMQKRLKKEKKTKRKLQEALEFESKRREQVEQALKQATTSDSGLRMLKDTGIPDIEIENNGTPHDSAAMQGGNYYCLEMAQQLYSA

SEQ ID NO: 2496 - protein, 710 aa, Homo sapiens
MSSQQFPRLGAPSTGLSQAPSQIANSGSAGLINPAATVNDESGRDSEVSAREHMSSSSSLQSREEKQEPVVVRPYPQVQMLSTHHAVASATPVAVTAPPAHLTPAVPLSFSEGLMKPPPKPTMPSRPIAPAPPSTLSLPPKVPGQVTVTMESSIPQASAIPVATISGQQGHPSNLHHIMTTNVQMSIIRSNAPGPPLHIGASHLPRGAAAAAVMSSSKVTTVLRPTSQLPNAATAQPAVQHIIHQPIQSRPPVTTSNAIPPAVVATVSATRAQSPVITTTAAHATDSALRPTLSIQHPPSAAISIQRPAQSRDVTTRITLPSHPALGTPKQQLHTMAQKTIFSTGTPVAAATVAPILATNTIPSATTAGSVSHTQAPTSTIVTMTVPSHSSHATAVTTSNIPVAKVVPQQITHTSPRIQPDYPAERSSLIPISGHRASPNPVAMETRSDNRPSVPVQFQYFLPTYPPSAYPLAAHTYTPITSSVSTIRQYPVSAQAPNSAITAQTGVGVASTVHLNPMQLMTVDASHARHIQGIQPAPISTQGIQPAPIGTPGIQPAPLGTQGIHSATPINTQGLQPAPMGTQQPQPEGKTSAVVLADGATIVANPISNPFSAAPAATTVVQTHSQSASTNAPAQGSSPRPSILRKKPATDGMAVRKTLIPPQPPDVASPRVESSMRSTSGSPRPAGAKPKSEIHVSMATPVTVSMETVS

SEQ ID NO: 2497 - protein, 202 aa, Homo sapiens
MAPLGDLAAESQPSLGRGVVVAIVRADRSPRLGEGGPAAEVYKRMKVGRRGVPAASRTPASFTCHEHHEDRAAPFGRRDGGRNGALEPQHRSLRAQALARCVVSAVPKPAPPSVFVRLCGPRNLGWFGPHLRLRTSAHARQRHPETRASARENTSRHSRNPSVSVPQDLLSLASRWCGRAPARPPVAQSRKWRKAVRGMTNR

SEQ ID NO: 2498 - protein, 676 aa, Homo sapiens
MQGTVAFEDVAVNFSQEEWSLLSEVQRCLYHDVMLENWVLISSLGCWCGSEDEEAPSKKSISIQRVSQVSTPGAGVSPKKAHSCEMCGAILGDILHLADHQGTHHKQKLHRCEAWGNKLYDSSNRPHQNQYLGEKPYRSSVEEALFVKRCKFHVSEESSIFIQSGKDFLPSSGLLLQEATHTGEKSNSKPECESPFQWGDTHYSCGECMKHSSTKHVFVQQQRLPSREECYCWECGKSFSKYDSVSNHQRVHTGKRPYECGECGKSFSHKGSLVQHQRVHTGKRPYECGGCGKSFSHKGSLVQHQRVHTGERPYECGECGKSFSQNGTLIKHQRVHTGERPYECEECGKCFTQKGNLIQHQRGHTSERPYECEECGKCFSQKGTLTEHHRVHTRERPYECGECGKSFSRKGHLRNHQRGHTGERPYECGECGKSFSRKGNLIQHQRSHTGERPYECRECRKLFRGKSHLIEHQRVHTGERPYECNECGKSFQDSSGFRVHQRVHTGEKPFECSECGKSFPQSCSLLRHRRVHTGERPYECGECGKSFHQSSSLLRHQKTHTAERPYECRECGKFFSSLLEHRRVHTGERPYECRECGKTFTRRSAHFKHQRLHTRGKPYECSECGKSFAETFSLTEHRRVHTGERPYECSECGKSFHRSSSLLRHQRVHTERSPYK

SEQ ID NO: 2499 - protein, 760 aa, Homo sapiens
MIITEDSLPSLEAILNYSIFNRENDLLAQFDAIPGKKGTRVLIWNIRRNKNGKSELDFDTDQYDILVSDFDTEEKMTGGVTSELPETEYSLRAFCGILYMKPRMKIFLRQKKVTTQMIAKSLANVEYDTHKPTFTNKQVRITFGFSCKNSNQFGIMMYHNNRLIKSFEKVGCQVKPTRGEGVGVIGVIECNFLKPAYNKQDFEYTKEYRLTINALAQKLNAYWKEKTSQDNFETSTVARPIPKVPDQTWVQCDECLKWRKLPGKIDPSMLPARWFCYYNSHPKYRRCSVPEEQELIDEDLCLSKAKKQEQTVEEKKKMPMENENHQVFSNPPKILTVQEMAGLNNKTIGYEGIHSPSVLPSGGEESRSPSLQLKPLDSSVLQFSSKYKWILGEEPVEKRRRLQNEMTTPSLDYSMPAPYRRVEAPVAYPEGENSHDKSSSERSTPPYLFPEYPEASKNTGQNREVSILYPGAKDQRQGSLLPEELEDQMPRLVAEESNRGSTTINKEEVNKGPFVAVVGVAKGVRDSGAPIQLIPFNREELAERRKAVESWNPVPYSVASAAIPAAAIGEKARGYEESEGHNTPKLKNQRELEELKRTTEKLERVLAERNLFQQKVEELEQERNHWQSEFKKVQHELVIYSTQEAEGLYWSKKHMGYRQAEFQILKAELERTKEEKQELKEKLKETETHLEMLQKAQVSYRTPEGDDLERALAKLTRLRIHVSYLLTSVLPHLELREIGYDSEQVDGILYTVLEANHILD

SEQ ID NO: 2500 - protein, 647 aa, Homo sapiens
MTVGRPEGAPGGAEGSRQIFPPESFADTEAGEELSGDGLVLPRASKLDEFLSPEEEMDSTSDSTGSIYQNLQELKQKGRWCLLESLFQSDPESDENLSEDEEDLESFFQDKDRGMVQVQCPQALRCGSTRRCSSLNNLPSNIPRPQTQPPSGSRPPSQHRSVSSWASSITVPRPFRMTLREARKKAEWLGSPASFEQERQRAQRQGEEEAECHRQFRAQPVPAHVYLPLYQEIMERSEARRQAGIQKRKELLLSSLKPFSFLEKEEQLKEAARQRDLAATAEAKISKQKATRRIPKSILEPALGDKLQEAELFRKIRIQMRALDMLQMASSPIASSSNRANPQPRTATRTQQEKLGFLHTNFRFQPRVNPVVPDYEGLYKAFQRRAAKRRETQEATRNKPFLLRTANLRHPQRPCDAATTGRRQDSPQPPATPLPRSRSLSGLASLSANTLPVHITDATRKRESAVRSALEKKNKADESIQWLEIHRKKSQAMSKSVTLRAKAMDPHKSLEEVFKAKLKENRNNDRKRAKEYKKELEEMKQRIQTRPYLFEQVAKDLAKKEAEQWYLDTLKQAGLEEDFVRNKGQGTRAVQEKETKIKDFPRFQETTKLSIRDPEQGLEGSLEQPASPRKVLEELSHQSPENLVSLA

SEQ ID NO: 2501 - protein, 224 aa, Homo sapiens
MAAPSEVAAIAPGEGDGGGGGFGSWLDGRLEALGVDRAVYGAYILGILQEEEEEEKLDALQGILSAFLEEDSLLNICKEIVERWSETQNVVTKVKKEDEVQAIATLIEKQAQIVVKPRMVSEEEKQRKAALLAQYADVTDEEDEADEKDDSGATTMNIGSDKLLFRNTNVEDVFNARKLERDSLRDESQRKKEQDKLQRERDKLAKQERKEKEKKRTQRGERKR

SEQ ID NO: 2502 - protein, 266 aa, Homo sapiens
MEPGAGGRNTARAQRAGSPNTPPPREQERKLEQEKLSGVVKSVHRRLRKKYREVGDFDKIWREHCEDEETLCEYAVAMKNLADNHWAKTCEGEGRIEWCCSVCREYFQNGGKRKALEKDEKRAVLATKTTPALNMHESSQLEGHLTNLSFTNPEFITELLQASGKIRLLDVGSCFNPFLKFEEFLTVGIDIVPAVESVYKCDFLNLQLQQPLQLAQDATDAFLKQLKNPIDSLPGELFHVVVFSLLLSYFPSPYQRWIAARKPMNC

SEQ ID NO: 2503 - protein, 831 aa, Homo sapiens
MPLEMEPKMSKLAFGCQRSSTSDDDSGCALEEYAWVPPGLRPEQIQLYFACLPEEKVPYVNSPGEKHRIKQLLYQLPPHDNEVRYCQSLSEEEKKELQVFSAQRKKEALGRGTIKLLSRAVMHAVCEQCGLKINGGEVAVFASRAGPGVCWHPSCFVCFTCNELLVDLIYFYQDGKIHCGRHHAELLKPRCSACDEIIFADECTEAEGRHWHMKHFCCLECETVLGGQRYIMKDGRPFCCGCFESLYAEYCETCGEHIGVDHAQMTYDGQHWHATEACFSCAQCKASLLGCPFLPKQGQIYCSKTCSLGEDVHASDSSDSAFQSARSRDSRRSVRMGKSSRSADQCRQSLLLSPALNYKFPGLSGNADDTLSRKLDDLSLSRQGTSFASEEFWKGRVEQETPEDPEEWADHEDYMTQLLLKFGDKSLFQPQPNEMDIRASEHWISDNMVKSKTELKQNNQSLASKKYQSDMYWAQSQDGLGDSAYGSHPGPASSRRLQELELDHGASGYNHDETQWYEDSLECLSDLKPEQSVRDSMDSLALSNITGASVDGENKPRPSLYSLQNFEEMETEDCEKMSNMGTLNSSMLHRSAESLKSLSSELCPEKILPEEKPVHLPVLRRSKSQSRPQQVKFSDDVIDNGNYDIEIRQPPMSERTRRRVYNFEERGSRSHHHRRRRSRKSRSDNALNLVTERKYSPKDRLRLYTPDNYEKFIQNKSAREIQAYIQNADLYGQYAHATPDYGLQNPGMNRFLGLYGEDDDSWCSSSSSSSDSEEEGYFLGQPIPQPRPQRFAYYTDDLSSPPSALPTPQFGQRTTKSKKKKGHKGKNCIIS

SEQ ID NO: 2504 - protein, 963 aa, Homo sapiens [sequence omitted]

SEQ ID NO: 2505 - protein, 730 aa, Homo sapiens [sequence omitted]

SEQ ID NO: 2506 - protein, 522 aa, Homo sapiens [sequence omitted]

SEQ ID NO: 2507 - protein, 693 aa, Homo sapiens
MRTVVLTMKASVIEMFLVLLVTGVHSNKETAKKIKRPKFTVPQINCDVKAGKIIDPEFIVKCPAGCQDPKYHVYGTDVYASYSSVCGAAVHSGVLDNSGGKILVRKVAGQSGYKGSYSNGVQSLSLPRWRESFIVLESKPKKGVTYPSALTYSSSKSPAAQAGETTKAYQRPPIPGTTAQPVTLMQLLAVTVAVATPTTLPRPSPSAASTTSIPRPQSVGHRSQEMDLWSTATYTSSQNRPRADPGIQRQDPSGAAFQKPVGADVSLGEMDSWKPGSVLLDEGLVPKEELSTQSLEPVSLGDPNCKIDLSFLIDGSTSIGKRRFRIQKQLLADVAQALDIGPAGPLMGVVQYGDNPATHFNLKTHTNSRDLKTAIEKITQRGGLSNVGRAISFVTKNFFSKANGNRSGAPNVVVVMVDGWPTDKVEEASRLARESGINIFFITIEGAAENEKQYVVEPNFANKAVCRTNGFYSLHVQSWFGLHKTLQPLVKRVCDTDRLACSKTCLNSADIGFVIDGSSSVGTGNFRTVLQFVTNLTKEFEISDTDTRIGAVQYTYEQRLEFGFDKYSSKPDILNAIKRVGYWSGGTSTGAAINFALEQLFKKSKPNKRKLMILITDGRSYDDVRIPAMAAHLKGVITYAIGVAWAAQEELEVIATHPARDHSFFVDEFDNLHQYVPRIIQNICTEFNSQPRN

SEQ ID NO: 2508 - protein, 419 aa, Homo sapiens
MAVSNIRYGAAVTKEVGMDLKNMGAKNVCLMTDKNLSKLPPVQVAMDSLVKNGIPFTVYDNVRVEPTDSSFMEAIEFAQKGAFDAYVAVGGGSTMDTCKAANLYASSPHSDFLDYVSAPIGKGKPVSVPLKPLIAVPTTSGTGSETTGVAIFDYEHLKVKIGITSRAIKPTLGLIDPLHTLHMPARVVANSGFDVLCHALESYTTLPYHLRSPCPSNPITRPAYQGSNPISDIWAIHALRIVAKYLKRAVRNPDDLEARSHMHLASAFAGIGFGNAGVHLCHGMSYPISGLVKMYKAKDYNVDHPLVPHGLSVVLTSPAVFTFTAQMFPERHLEMAEILGADTRTARIQDAGLVLADTLRKFLFDLDVDDGLAAVGYSKADIPALVKGTLPQERVTKLAPRPQSEEDLAALFEASMKLY

SEQ ID NO: 2509 - protein, 395 aa, Homo sapiens
MDLCQKNETDLENAENNEIQFTEETEPTYTCPDGKSEKNHVYCLLDVSDITLEQDEKAKEFIIGTGWEEAVQGWGRTSPAACIWPRKIPKKARVGEGACSDCLVCVNLSHWSLQTKPPTEGGPEKDQSSPSQTQAAPQGPSTASRAISDICFPTYFRAEKKSLQIKEFIWCNKDWAIPGTNRGKASGNPSGGAHRGLSIPGPLTSRALLVLPPLKALLSNALDVLGKKSKNSFLQSEEKVLDVEKDGCVAYAYGLKTADGKGEKRASELAKHPMVNDTPSSPSPAAQISLLTDPEQRCLHWSLLSEKNLACPPDPSNVRYLAALQLLQKRGVQSYKSKFKAKEPRSPVITRKHVLPKAKQENRPQMLETKVFPRPVLPSLTVSRVIIPVSTHRIL

SEQ ID NO: 2510 - protein, 766 aa, Homo sapiens
MEEIKPASASCVSKEKPSKVSDLISRFEGGSSLSNYSDLKKESAVNLNAPRTPGRHGLTTTPQQKLLSQHLPQRQGNDADKTQGAQTCVANGVMAAQNQMECEEEKAATLSSDTSIQASEPLLDTHIVNGERDETATAPASPTTDSCDGNASDSSYRTPGIGPVLPLEERGAETETKVQERENGESPLELEQLDQHHEMKETNEQKLHKIANELLLTERAYVNRLDLLDQVFYCKLLEEANRGSFPAEMVNKIFSNISSINAFHSKFLLPELEKRMQEWETTPRIGDILQKLAPFLKMYGEYVKGFDNAMELVKNMTERIPQFKSVVEEIQKQKICGSLTLQHHMLEPVQRIPRYEMLLKDYLRKLPPDSLDWNDAKKSLEIISTAASHSNSAIRKMENLKKLLEIYEMLGEEEDIVNPSNELIKEGQILKLAARNTSAQERYLFLFNNMLLYCVPKFSLVGSKFTVRTRVGIDGMKIVETQNEEYPHTFQVSGKERTLELQASSAQDKEEWIKALQETIDAFHQRHETFRNAIAKDNDIHSEVSTAELGKRAPRWIRDNEVTMCMKCKEPFNALTRRRHHCRACGYVVCWKCSDYKAQLEYDGGKLSKVCKDCYQIISGFTDSEEKKRKGILEIESAEVSGNSVVCSFLQYMEKSKPWQKAWCVIPKQDPLVLYMYGAPQDVRAQATIPLLGYVVDEMPRSADLPHSFKLTQSKSVHSFAADSEELKQKWLKVILLAVTGETPGGPNEHPATLDDHPEPKKKSEC

SEQ ID NO: 2511 - protein, 1021 aa, Homo sapiens
MEKVLGCELLKGLNVLDLGLNMEILEEQMLHEILCREYPELETRWQDLKIRALDTCKAVEAAEERLLTMLLFQNPKRQKPAKFLRNIVRAQGKLCQLRAHCEELEGQKLQEMVLWAPYRPVVWHGMAMVKALSQLQNLLPLFCMSPENWLAVTKQALDSMKPREINHGEDLASHLLQLRAHLTRQLLGSTVTALGLTQVPLVGALGALALLQATGKASELERLALWPGLAASPSTVHSKPVSDVARPAWLGPKAWHECEMLELLPPFVGLCASLAGHSSAWQAYLSLSSTVLGPAPGPGPEPLSLLQKLILWRVLRPECLAGALADFTTSLLGRPLDENTYAPTMPFKHSQATQPMLILLPPPGHPSATLHPLTVIQKLAAKYQQGQKQLQVIALGSEAWDPVSVVVSTLSQAMYEGHWLVLDNCHLMPHWPKELLQLLLELLGRAKVVADLESEQLLDQPESRNVSTVHRDFRLWLIVPAESSASLPAVLTQHSMPVFWNQSLELGHVLIDSVELAQQVLYMQPPTQALPLLLLHGLLLHRQLYGTRLQAHRGRWSQVTLTQVLQTQDQLWASLSNPRAAMQELAASVFYGGPLGDTEDREALISLTQACLSPSSGSWVQPHTPQSLLATLMPLPELRELDAMAECKAQMHLLPSPPEPRLCGLSEGPQAWLLRRQSRALLSALQRSSPVWVPESRRGAQLAERRLRQRLVQVNRRLESLQDLLTHVIRQDESDAPWSVLGPNARRPLEGVLETEALELSQLVGTLQRDLDCLLQQLKGAPPCPSRRCAAVAHALWTGRLPLPWRPHAPAGPQPPWHWLRQLSRRGQLLVRYLGVGADASSDVPERVFHLSAFRHPRRLLLALRGEAALDQNVPSSNFPGSRGSVSSQLQYKRLEMNSNPLHFRVENGPNPTVPERGLLLIGLQVLHAEWDPIAGALQDSPSSQPSPLPPVSISTQAPGTSDLPAPADLTVYSCPVYMGGPLGTAKLQSRNIVMHLPLPTKLTPNTCVQRRVHVCSPPLS

SEQ ID NO: 2512 - protein, 418 aa, Homo sapiens
MNVCKDSPRNKVNQKSKVMEKKLPQHWTAETTKDLGPFLVLFSGDELSSIATKFPEILLQAASKMARTLPTKEFLWAVFQSVRNSSDKIPSYDPMPGCHGVVAPSSDDIFKLAEANACWALEDLRCMEEDTFIRTVELLGAVQGFSRPQLMTLKEKAIQVWDMPSYWREHHIVSLGRIALALNESELEQLDLSSIDTVASLSWQTEWTPGQAESILQGYLDDSGYSIQDLKSFHLVGLGATLCAINITEIPLIKISEFRVVVARIGTLLCSTHVLAEFKRKAEVVFGDPTEWTSSVLQELGTIAAGLTKAELRMLDKDLMPYFQPSAIKCLPDEIFKELSAEQIASLGPENAAAVTHAQRRRLSPLQLQSLQQALDGAKTHSWQDAPASAGPTRTSSSRSPAGALQSWGLGLVVPCWF

SEQ ID NO: 2513 - protein, 343 aa, Homo sapiens
MPRGQKSKLRAREKRHQARCENQDLGATQATVAEGESPSSAYLLFGDRPQNLPAAETPSIPEALQGAPSTTNAIAPVSCSSNEGASSQDEKSLGSSREAEGWKEDPLNKKVVSLVHFLLQKYETKEPITKGDMIKFVIRKDKCHFNEILKRASEHMELALGVDLKEVDPIRHYYAFFSKLDLTYDETTSDEEKIPKTGLLMIALGVIFLNGNRAPEEAVWEIMNMMGVYADRKHFLYGDPRKVMTKDLVQLKYLEYQQVPNSDPPRYEFLWGPRAHAETSKMKVLEFVAKIHDTVPSAFPSCYEEALRDEEQRTQARAAARAHTAAMANARSRTTSSSFSHAK

SEQ ID NO: 2514 - protein, 570 aa, Homo sapiens
MAYEKSTDISDVSRSMFLYPWLEYPDKTKELRKAMAPVHLPLSCYQMPKEEFPPSPECWRQHPSKPNSVPYCYFKKPEIYTHWHDLYDQREEREAEKMLRKMRDDCRYIKEVHQTHIKMFHLPMSKLTIKSEMRSRPLEPTQDPLKWQRLRELTKSLESPREDEQFYAAQALGCLRISDKFVMEALQQVAQTGPEKVKYEAYRTLAILGCLNKHVIRALIKRLKEKNEGQRMETLTGLRMALNSWAAVSKDKRTQVGDEGKLVPVLQTLIKKSSSEASLEAALCLGFLRPCSNMVQEFLLQCLCQGLKTQRMKALRMLVKVMHVHSAPVIKAILDQLCSSSVLEDRFEATQMLKTIGLEQIQAQGLEELTFNLLRRKTHNEPFLAVRQAVAQTVEELKLKPTMMNLVEAQLMNPDATARQEAVISLGVLGIRSPQVFHLLLDLLDAENHQAVKKSLQETLILCASIDPWIQNKLKNKVLFVYEAPKTNVKAEPTRFQKEPENPEELTIQDFRLAKLNPLFIAKSITKVGQKKTPAFPPCCSKPRKHRPQVIGPWQPRIKKQLRVLAEIAK

SEQ ID NO: 2515 - protein, 443 aa, Homo sapiens
MKPNKRVEVAQLNDVMDTMLERAGVENQEYTGPTKMHKLLHILKKEQTIYNMIFHELIRQVSVDCADRGELLSKVRERYVQMLDQIARQMIDFYKDLVTQRVMDQRILEELYNFKHVIEELTRELCLVRAHDVKLTKETEKAHKDLAQALLNAEKNAKIVEEYHDLYTLQRERMENDMKKLVAERDIWSSATYELALKVIERNRVILARRLYLNEKGWNKYTKHFIILLSNKDTEDLALLQKLTQKWRNLVNKLKQEVEQMEESTSETLKIVKDGLIKWQEFFNEKDILSPNKGNIFNSVLLDFKQWQKILNEKKEEFTGDVLLSKYDTLKIIKHLQENWADIGLGIFNRHKSLEGEMPSERQYMEEIIKNIQKLYKEYEIRINGDNETGSHRVAQAGLKLLGSSDHPTSAPQSAGIRGIIHRTWPWVNFYIVCEVTPKFFQV

SEQ ID NO: 2516 - protein, 504 aa, Homo sapiens
MIQGKEDDIYLMVIWELPDVVPFLQDGKHAVHLRMSTRDRNMAIPFPDVELIVERNFSQPTDNPTMDLLRVNCIDLLQVEGYNLIAAGTLNGVIILWNFVTSTVKKVYRPEDCFTVNPDLHSKHFKINDILFLFRTPECARRSSQDSICSSSQCESSKGPQSSKGSKQSIHDSEVKGEQTDVMVGKQQPMDKKHPGIANLPEAQPPILVTAHEDGHLRLWTLEGRLLKDMLPFTKHSAISLTSLYTDSCTRILLAGNVEGHVILCNISSFLDPPHDEKKFKQLLSWRAHSLEIIQVIYVEEKQVVLTASIDGSVRLWHALNGHYCGYFGQRRLFELSQTRDFILPCDVTEYPIEIKEESKFTEKQKYEYPLIFDREKWRKMSSVSLLFKRTPPKAFEVEQDFKFFKSLSSPKIRRYPLEGFVTENREAGIVFGSLPIYSISSPTSLRFLPLIGVEAQKDSSDGITGKKKGGHVQREKAPRRRSLKKNLVPQINLASSFFPAIPK

SEQ ID NO: 2517 - protein, 380 aa, Homo sapiens
MSGAGVAAGTRPPSSPTPGSRRRRQRPSVGVQSLRPQSPQLRQSDPQKRNLDLEKSLQFLQQQHSEMLAKLHEEIEHLKRENKDLRYKLIMNQTSQKKDGPSGNHLSRASAPLGARWVCINGVWVEPGGPSPARLKEGSSRTHRPGGKHGRLAGGSADTVRSPADSLSTSSFQSVKSISNSGKARPQPGSFNKQDSKADVPQKADLEEEPLLHNSKLDKVPGVQGQARKEKAEASNAGAACMGNSQHQGRQMGAAAHPPMILPLPLRKPTTLRQCEVLIRELWNTNLLQTQELQHLKSLLEGSQRPQAVPEEASFPRDQEATHFPKVSTKSLSKKCLLLSPPVAERAILPALKQTPKNNFAERQKRLQAMQKRRLHRSVL

SEQ ID NO: 2518 - protein, 427 aa, Homo sapiens
MAQPGTLNLNNEVVKMRKEVKRIRVLVIRKLVRSVGRLKSKKGTEDALLKNQRRAQRLLEEIHAMKELKPDIVTKSALGDDINFEKIFKKPDSTATERAIARLAVHPLLKKKIDVLKAAVQAFKEARQNVAEVESSKNASEDNHSENTLYSNDNGSNLQREATVISEQKVKETKILAKKPIHNSKEKIAKMEHGPKAVTIANSPSKPSEKDSVVSLESQKTPADPKLKTLSQTKKNKGSDSSLSGNSDGGEEFCEEEKEYFDDSTEERFYKQSSMSEDSDSGDDFFIGKVRRTRKKESSCHSSVKEQKPLEKVFLKEDTGETHGDTRNDKIKPSTETRKLESVFSHSLSGSKSSRRNFKEQAPKTRSLDFPQNEPQIKNQFNKKLSGRLENTKQQLQLPLHPSWEASRRRKEQQSNIAVFQGKKNYV

SEQ ID NO: 2519 - protein, 276 aa, Homo sapiens
MAADESSQNTLRLQFKAMQEMQHKRLQKQMEKKREKELSLKSRADDQEEPLEVSDGLSLLHAGEPNSKNSFEKRVLEDEIEHLRNELRETVDENGRLYKLLKERDFEIKHLKKKIEEDRFAFTGTAGVAGDVVATKIVELSKKNRLLMAESEGAKTRVKQLTNRIQELERELQTALTRLSAKGATDAGAKPPRAQMGDRALLETPEVKALQDRLVATNLKMSDLRNQIQSVKQELRMAQKVFQSQGLGLLVWLGLDLGRARLAQWIPFWSHECSVP

SEQ ID NO: 2520 - protein, 190 aa, Homo sapiens; identical to SEQ ID NO: 1221

SEQ ID NO: 2521 - protein, 201 aa, Homo sapiens
MAARTAFGAVCRRLWQGLGNFSVNTSKGNTAKNGGLLLSTNMKWVQFSNLHVDVPKDLTKPVVTISDEPDILYKRLSVLVKGHDKAVLDSYEYFAVLAAKELGISIKVHEPPRKIERFTLLQSVHIYKKHRVQYEMRTLYRCLELEHLTGSTADVYLEYIQRNLPEGVAMEVTKTQLEQLPEHIKEPIWETLSEEKEESKS

SEQ ID NO: 2522 - protein, 440 aa, Homo sapiens
MGQSQSGGHGPGGGKKDDKDKKKKYEPPVPTRVGKKKKKTKGPDAASKLPLVTPHTQCRLKLLKLERIKDYLLMEEEFIRNQEQMKPLEEKQEEERSKVDDLRGTPMSVGTLEEIIDDNRAIVSTSVGSEHYVSILSFVDKDLLEPGCSVLLNHKVHAVIGVLMDDTDPLVTVMKVEKAPQETYADIGGLDNQIQEIKESVELPLTHPEYYEEMGIKPPKGVILYGPPGTGKTLLAKAVANQTSATFLRVVGSELIQKYLGDGPKLVRELFRVAEEHAPSIVFIDEIDAIGTKRYDSNSGGEREIQRTMLELLNQLDGFDSRGDVKVIMATNRIETLDPALIRPGRIDRKIEFPLPDEKTKKRIFQIHTSRMTLADDVTLDDLIMAKDDLSGADIKAICTEAGLMALRERRMKVTNEDFKKSKENVLYKKQEGTPEGLYL

SEQ ID NO: 2523 - protein, 500 aa, Homo sapiens
MAYAARTMGKLAYEGVSSRKTYFSEEDVCGCLEAGIRTEEEFQLLHIFRRDALRFFLAPCVEPGRAGTFVFTVPAMQEYLAALYIVLGLRKTTLQKVGKEVAELVGRVGEDVSLVLGIMAKLLPLRALPLLFNLIKVVPRVFGRMVGKSREAVAQAMVLEMFREEDYYNDDVLDQMGASILGVEGPRRHPDEPPEDEVFELFPMFMGGLLSAHNRAVLAQLGCPIKNLDALENAQAIKKKLGKLGRQVLPPSELLDHLFFHYEFQNQRFSAEVLSSLRQLNLAGVRMTPVKCTVVAAVLGSGRHALDEVNLASCQLDPAGLRTLLPVFLRARKLGLQLNSLGPEACKDLRDLLLHDQCQITTLRLSNNPLTEAGVAVLMEGLAGNTSVTHLSLLHTGLGDEGLELLAAQLDRNRQLQELNVAYNGAGDTAALALARAAREHPSLELLQGVAIQMCWKLPLLPYAHLWTPRMPSHWCFLLILMPPLPQWYDGLVAPRGRCT

SEQ ID NO: 2524 - protein, 237 aa, Homo sapiens
MAAASGSVLQRCIVSPAGRHSASLIFLHGSGDSGQGLRMWIKQVLNQDLTFQHIKIIYPTAPPRSYTPMKGGISNVWFDRFKITNDCPEHLESIDVMCQVLTDLIDEEVKSGIKKNRILIGGFSMGGCMAMHLAYRNHQDVAGVFALSSFLNKASAVYQALQKSNGVLPELFQCHGTADELVLHSWAEETNSMLKSLGVTTKFHSFPNVYHELSKTELDILKLWILTKLPGEMEKQK

SEQ ID NO: 2525 - protein, 298 aa, Homo sapiens
MFSRAGVAGLSAWTLQPQWIQVRNMATLKDITRRLKSIKNIQKIAKSMKMVAAAKYARAERELKPARIYGLGSLALYEKADIKGPEDKKKHLLIGVSSDRGLCGAIHSSIAKQMKSEVATLTAAGKEVMLVGIGDKIRGILYRTHSDQFLVAFKEVGRKPPTFGDASVIALELLNSGYEFDEGSIIFNKFRSVISYKTEEKPIFSLNTVASADSMSIYDDIDADVLQNYQEYNLANIIYYSLKESTTSEQSARMTAMDNASKNASEMIDKLTLTFNRTRQAVITKELIEIISGAAALD

SEQ ID NO: 2526 - protein, 241 aa, Homo sapiens
MSGFQINLNPLKEPLGFIKVLEWIASIFAFATCGGFKGQTEIQVNCPPAVTENKTVTATFGYPFRLNEASFQPPPGVNICDVNWKDYVLIGDYSSSAQFYVTFAVFVFLYCIAALLLYVGYTSLYLDSRKLPMIDFVVTLVATFLWLVSTSAWAKALTDIKIATGHNIIDELPPCKKKAVLCYFGSVTSMGSLNVSVIFGFLNMILWGGNAWFVYKETSLHSPSNTSAPHSQGGIPPPTGI

SEQ ID NO: 2527 - protein, 111 aa, Homo sapiens
MGLTEKLIFSLRDPAYSTFPPEGVFVNTLGLLILVFGALIFWIVTRPQWKRPKEPNSTILHPNGGTEQGARGSMPAYSGNNMDKSDSELNNEVAARKRNLALDEAGQRSTM

SEQ ID NO: 2528 - protein, 459 aa, Homo sapiens
MTVELWLRLRGKGLAMLHVTRGVWGSRVRVWPLLPALLGPPRALSSLAAKMGEYRKMWNPREPRDWAQQYRERFIPFSKEQLLRLLIQEFHSSPAEKAALEAFSAHVDFCTLFHYHQILARLQALYDPINPDRETLDQPSLTDPQRLSNEQEVLRALEPLLAQANFSPLSEDTLAYALVVHHPQDEVQVTVNLDQYVYIHFWALGQRVGQMPLKSSVGSRRGFFTKLPPAERRYFKRVVLAARTKRGHLVLKSFKDTPLEGLEQLLPELKVRTPTLQRALLNLMLVVSGVAIFVNVGMVVLTDLKVATSLLLLLFAIFMGLRASKMFGQRRSAQALELAHMLYYRSTSNNSELLSALALRAQDEHTKEALLAHSFLARRPGGTQGSPEETSRWLRSEVENWLLAKSGCEVTFNGTRALAHLQALTPSMGLYPPPGFPKLDPVAPITSEPPQATPSSNIS

SEQ ID NO: 2529 - protein, 459 aa, Homo sapiens; identical to SEQ ID NO: 2528

SEQ ID NO: 2530 - protein, 199 aa, Homo sapiens
APGRLASRPPPPPARRWRLAAPRYSSASGPSGPAARLCAETQGEAPRGPRAVGGSGGAGEPRWSRGPAQRERLLGCSCCFPSFFTGTCSFRTSWSAFTLELTSSIPAPLPPPPAALSLSQQQGKSRRKEASTPLTPAEAPAYSRARPRRQGSPSAGPEAPLATDEPPPQRRSGIRGGSANIRSLQPSSLRPSAHRGSAL

SEQ ID NO: 2531 - protein, 423 aa, Homo sapiens [sequence omitted]

SEQ ID NO: 2532 - protein, 690 aa, Homo sapiens
MTDTVFSNSSNRWMYPSDRPLQSKLQAGWSVHPGGQPDRQRKQEELTDEEKEIINRVIARAEKMEEMEQERIGRLVDRLENMRKNVAGDGVNRCILCGEQLGMLGSACVVCEDCKKNVCTKCGVETNNRLHSVWLCKICIEQREVWKRSGAWFFKGFPKQVLPQPMPIKKTKPQQPVSEPAAPEQPAPEPKHPARAPARGDSEDRRGPGQKTGPDPASAPGRGNYGPPVRRASEARMSSSSRDSESWDHSGGAGDSSRSPAGLRRANSVQASRPAPGSVQSPAPPQPGQPGTPGGSRPGPGPAGRFPDQKPEVAPSDPGTTAPPREERTGGVGGYPAVGAREDRMSHPSGPYSQASAAAPQPAAARQPPPPEEEEEEANSYDSDEATTLGALEFSLLYDQDNSSLQCTIIKAKGLKPMDSNGLADPYVKLHLLPGASKSNKLRTKTLRNTRNPIWNETLVYHGITDEDMQRKTLRISVCDEDKFGHNEFIGETRFSLKKLKPNQRKNFNICLERVIPMKRAGTTGSARGMALYEEEQVERVGDIEERGKILVSLMYSTQQGGLIVGIIRCVHLAAMDANGYSDPFVKLWLKPDMGKKAKHKTQIKKKTLNPEFNEEFFYDIKHSDLAKKSLDISVWDYDIGKSNDYIGGCQLGISAKGERLKHWYECLKNKDKKIERWHQLQNENHVSSD

SEQ ID NO: 2533 - protein, 328 aa, Homo sapiens [sequence omitted]

SEQ ID NO: 2534 - protein, 169 aa, Homo sapiens
GQQEEPETIPERTPADLEFSRLRFREFVYQEAAGPHQTLARLHELCRQWLMPEACSKEQMLELLVLEQFLGILPDKVRPWVVAQYPESCKKAASLVEGLADVLEEPGMLLGSPAGSSSILSDGVYERHMDPLLLPGELASPSQALGAGEIPAPSETRECPASLAASAGP

SEQ ID NO: 2535 - protein, 323 aa, Homo sapiens
MAAAALPAWLSLQSRARTLRAFSTAVYSATPVPTPSLPERTPGNERPPRRKALPPRTEKMAVDQDWPSVYPVAAPFKPSAVPLPVRMGYPVKKGVPMAKEGNLELLKIPNFLHLTPVAIKKHCEALKDFCTEWPAALDSDEKCEKHFPIEIDSTDYVSSGPSVRNPRARVVVLRVKLSSLNLDDHAKKKLIKLVGERYCKTTDVLTIKTDRCPLRRQNYDYAVYLLTVLYHESWNTEEWEKSKTEADMEEYIWENSSSERNILETLLQMKAAEKNMEINKEELLGTKEIEEYKKSVVSLKNEEENENSISQYKESVKRLLNVT

SEQ ID NO: 2536 - protein, 414 aa, Homo sapiens
MAASIVRRGMLLARQVVLPQLSPAGKRYLLSSAYVDSHKWEAREKEHYCLADLASLMDKTFERKLPVSSLTISRLIDNISSREEIDHAEYYLYKFRHSPNCWYLRNWTIHTWIRQCLKYDAQDKALYTLVNKVQYGIFPDNFTFNLLMDSFIKKENYKDALSVVFEVMMQEAFEVPSTQLLSLYVLFHCLAKKTDFSWEEERNFGASLLLPGLKQKNSVGFSSQLYGYALLGKVELQQGLRAVYHNMPLIWKPGYLDRALQVMEKVAASPEDIKLCREALDVLDAVLKALTSADGASEEQSQNDEDNQGSEKLVEQLDIEETEQSKLPQYLERFKALHSKLQALGKIESEGLLSLTTQLVKEKLSTCEAEDIATYEQNLQQWHLDLVQLIQREQQQREQAKQEYQAQKAAKASA

SEQ ID NO: 2537 - protein, 311 aa, Homo sapiens
VIVLGLYIYVTYKKPDVNWGSSTQALTYLNALQHSIRLSGVEDHVKNFRPQCLVMTGAPNSRPALLHLVHDFTKNVGLMICGHVHMGPRRQAMKEMSIDQAKYQRWLIKNKMKAFYAPVHADDLREGAQYLMQAAGLGRMKPNTLVLGFKKDWLQADMRDVDMYINLFHDAFDIQYGVVVIRLKEGLDISHLQGQEELLSSQEKSPGTKDVVVSVEYSKKSDLDTSKPLSEKPITHKESKGPIVPLNVADQKLLEASTQFQKKQGKNTIDVWWLFDDGGLTLLIPYLLTTKKKWKDCKIRVFIGGKINRID

SEQ ID NO: 2538 - protein, 172 aa, Homo sapiens
MAYDRYVAICSPLLYSTKMSTQVSVQLLLVVYIAGFLIAVSYTTSFYFLLFCGPNQVNHFFCDFAPLLELSCSDISVSTVVLSFSSGSIIVVTVCVIAVCYIYILITILKMHSTKGRHKAFSTCTSHLTAVTLFYGTITFIYVMPKSSYSTDQNKVVSVFYTVVIPMLNPLI

SEQ ID NO: 2539 - protein, 285 aa, Homo sapiens
STQDEVAASAILTAQLDEELGGTPVQSRVVQGKEPAHLMSLFGGKPMIIYKGGTSREGGQTAPASTRLFQVRANSAGATRAVEVLPKAGALNSNDAFVLKTPSAAYLWVGTGASEAEKTGAQELLRVLRAQPVQVAEGSEPDGFWEALGGKAAYRTSPRLKDKKMDAHPPRLFACSNKIGRFVIEEVPGELMQEDLATDDVMLLDTWDQVFVWVGKDSQEEEKTEALTSAKRYIETDPANRDRRTPITVVKQGFEPPSFVGWFLGWDDDYWSVDPLDRAMAELAA

SEQ ID NO: 2540 - protein, 595 aa, Homo sapiens [sequence omitted]

SEQ ID NO: 2541 - protein, 1311 aa, Homo sapiens
MSLLQSALDFLAGPGSLGGASGRDQSDFVGQTVELGELRLRVRRVLAEGGFAFVYEAQDVGSGREYALKRLLSNEEEKNRAIIQEVCFMKKLSGHPNIVQFCSAASIGKEESDTGQAEFLLLTELCKGQLVEFLKKMESRGPLSCDTVLKIFYQTCRAVQHMHRQKPPIIHRDLKVENLLLSNQGTIKLCDFGSATTISHYPDYSWSAQRRALVEEEITRNTTPMYRTPEIIDLYSNFPIGEKQDIWALGCILYLLCFRQHPFEDGAKLRIVNGKYSIPPHDTQYTVFHSLIRAMLQVNPEERLSIAEVVHQLQEIAAARNVNPKSPITELLEQNGGYGSATLSRGPPPPVGPAGSGYSGGLALAEYDQPYGGFLDILRGGTERLFTNLKDTSSKVIQSVANYAKGDLDISYITSRIAVMSFPAEGVESALKNNIEDVRLFLDSKHPGHYAVYNLSPRTYRPSRFHNRVSECGWAARRAPHLHTLYNICRNMHAWLRQDHKNVCVVHCMDGRAASAVAVCSFLCFCRLFSTAEAAVYMFSMKRCPPGIWPSHKRYIEYMCDMVAEEPITPHSKPILVRAVVMTPVPLFSKQRSGCRPFCEVYVGDERVASTSQEYDKMRDFKIEDGKAVIPLGVTVQGDVLIVIYHARSTLGGRLQAKMASMKMFQIQFHTGFVPRNATTVKFAKYDLDACDIQEKYPDLFQVNLEVEVEPRDRPSREAPPWENSSMRGLNPKILFSSREEQQDILSKFGKPELPRQPGSTAQYDAGAGSPEAEPTDSDSPPSSSADASRFLHTLDWQEEKEAETGAENASSKESESALMEDRDESEVSDEGGSPISSEGQEPRADPEPPGLAAGLVQQDLVFEVETPAVLPEPVPQEDGVDLLGLHSEVGAGPAVPPQACKAPSSNTDLLSCLLGPPEAASQGPPEDLLSEDPLLLASPAPPLSVQSTPRGGPPAAADPFGPLLPSSGNNSQPCSNPDLFGEFLNSDSVTVPPSFPSAHSAPPPSCSADFLHLGDLPGEPSKMTASSSNPDLLGGWAAWTETAASAVAPTPATEGPLFSPGGQPAPCGSQASWTKSQNPDPFADLGDLSSGLQGSPAGFPPGGFIPKTATTPKGSSSWQTSRPPAQGASWPPQAKPPPKACTQPRPNYASNFSVIGAREERGVRAPSFAQKPKVSENDFEDLLSNQGFSSRSDKKGPKTIAEMRKQDLAKDTDPLKLKLLDWIEGKERNIRALLSTLHTVLWDGESRWTPVGMADLVAPEQVKKHYRRAVLAVHPDKAAGQPYEQHAKMIFMELNDAWSEFENQGSRPLF

SEQ ID NO: 2542 - protein, 785 aa, Homo sapiens
MGKKYKNIVLLKGLEVINDYHFRMVKSLLSNDLKLNLKMREEYDKIQIADLMEEKFRGDAGLGKLIKIFEDIPTLEDLAETLKKEKLKVKGPALSRKRKKEVHATSPAPSTSSTVKTEGAEATPGAQKRKKSTKEKAGPKGSKVSEEQTQPPSPAGAGMSTAMGRSPSPKTSLSAPPNSSSTENPKTVAKCQVTPRRNVLQKRPVIVKVLSTTKPFEYETPEMEKKIMFHATVATQTQFFHVKVLNTSLKEKFNGKKIIIISDYLEYDSLLEVNEESTVSEAGPNQTFEVPNKIINRAKETLKIDILHKQASGNIVYGVFMLHKKTVNQKTTIYEIQDDRGKMDVVGTGQCHNIPCEEGDKLQLFCFRLRKKNQMSKLISEMHSFIQIKKKTNPRNNDPKSMKLPQEQRQLPYPSEASTTFPESHLRTPQMPPTTPSSSFFTKKSEDTISKMNDFMRMQILKEGSHFPGPFMTSIGPAESHPHTPQMPPSTPSSSFLTTKSEDTISKMNDFMRMQILKEGSHFPGPFMTSIGPAESHPHTPQMPPSTPSSSFLTTLKPRLKTEPEEVSIEDSAQSDLKEVMVLNATESFVYEPKEQKKMFHATVATENEVFRVKVFNIDLKEKFTPKKIIAIANYVCRNGFLEVYPFTLVADVNADRNMEIPKGLIRSASVTPKINQLCSQTKGSFVNGVFEVHKKNVRGEFTYYEIQDNTGKMEVVVHGRLNTINCEEGDKLKLTSFELAPKSGNTGELRSVIHSHIKVIKTRKNKKDILNPDSSMETSPDFFF

SEQ ID NO: 2543 - protein, 547 aa, Homo sapiens [sequence omitted]

SEQ ID NO: 2544 - protein, 653 aa, Homo sapiens
MPVGGLLPLFSSPAGGVLGGGLGGGGGRKGSGPAALRLTEKFVLLLVFSAFITLCFGAIFFLPDSSKLLSGVLFHSSPALQPAADHKPGPGARAEDAAEGRARRREEGAPGDPEAALEDNLARIRENHERALREAKETLQKLPEEIQRDILLEKKKVAQDQLRDKAPFRGLPPVDFVPPIGVESREPADAAIREKRAKIKEMMKHAWNNYKGYAWGLNELKPISKGGHSSSLFGNIKGATIVDALDTLFIMEMKHEFEEAKSWVEENLDFNVNAEISVFEVNIRFVGGLLSAYYLSGEEIFRKKAVELGVKLLPAFHTPSGIPWALLNMKSGIGRNWPWASGGSSILAEFGTLHLEFMHLSHLSGNPIFAEKVMNIRTVLNKLEKPQGLYPNYLNPSSGQWGQHHVSVGGLGDSFYEYLLKAWLMSDKTDLEAKKMYFDAVQAIETHLIRKSSSGLTYIAEWKRGLLEHKMGHLTCFAGGMFALGADAAPEGMAQHYLELGAEIARTCHESYNRTFMKLGPEAFRFDGGVEAIATRQNEKYYILRPEVMETYMYMWRLTHDPKYRKWAWEAVEALENHCRVNGGYSGLRDVYLLHESYDDVQQSFFLAETLKYLYLIFSDDDLLPLEHWIFNSEAHLLPILPKDKKEVEIREE

SEQ ID NO: 2545 - protein, 120 aa, Homo sapiens
LVRLPDSGGGRRSLVSQVAVHGENGRGGLGCVRAIQCLVPSYPSPRPRSSMFTRAQVRRILQRVPGKQRFGIYRFLPFFFVLGGTMEWIMIKVRVGQETFYDVYRRKASERQYQRRLEDE

SEQ ID NO: 2546 - protein, 297 aa, Homo sapiens; identical to SEQ ID NO: 2237

SEQ ID NO: 2547 - protein, 264 aa, Homo sapiens
MAVGASIAARLGTYPDWFFFCSFIGMFVFYCAHWQTYVSGMLRFGKVDVTEIQIALVIVFVLSAFGGATMWDYTIPILEIKLKILPVLGFLGGVIFSCSNYFHVILHGGVGKNGSTIAGTSVLSPGLHIGLIIILAIMIYKKSATDVFEKHPCLYILMFGCVFAKVSQKLVVAHMTKSELYLQDTVFLGPGLLFLDQYFNNFIDEYVVLWMAMVISSFDMVIYFSALCLQISRHLHLNIFKTACHQAPEQVQVLSSKSHQNNMD

SEQ ID NO: 2548 - protein, 1193 aa, Homo sapiens
MPQLLRNVLCVIETFHKYASEDSNGATLTGRELKQLIQGEFGDFFQPCVLHAVEKNSNLLNIDSNGIISFDEFVLAIFNLLNLCYLDIKSLLSSELRQVTKPEKEKLDDVDVQATTGDGQWTVGTSPTQEKRMLPSGMASSSQLIPEESGAVGNNRVDPWREAKTHNFPGEASEHNDPKNKHLEGDEQSQEVAQDIQTTEDNEGQLKTNKPMAGSKKTSSPTERKGQDKEISQEGDEPAREQSVSKIRDQFGEQEGNLATQSSPPKEATQRPCEDQEVRTEKEKHSNIQEPPLQREDEPSSQHADLPEQAAARSPSQTQKSTDSKDVCRMFDTQEPGKDADQTPAKTKNLGEPEDYGRTSETQEKECETKDLPVQYGSRNGSETSDMRDERKERRGPEAHGTAGQKERDRKTRPLVLETQTQDGKYQELQGLSKSKDAEKGSETQYLSSEGGDQTHPELEGTAVSGEEAEHTKEGTAEAFVNSKNAPAAERTLGARERTQDLAPLEKQSVGENTRVTKTHDQPVEEEDGYQGEDPESPFTQSDEGSSETPNSLASEEGNSSSETGELPVQGDSQSQGDQHGESVQGGHNNNPDTQRQGTPGEKNRALEAVVPAVRGEDVQLTEDQEQPARGEHKNQGPGTKGPGAAVEPNGHPEAQESTAGDENRKSLEIEITGALDEDFTDQLSLMQLPGKGDSRNELKVQGPSSKEEKGRATEAQNTLLESLDEDNSASLKIQLETKEPVTSEEEDESPQELAGEGGDQKSPAKKEHNSSVPWSSLEKQMQRDQEPCSVERGAVYSSPLYQYLQEKILQQTNVTQEEHQKQVQIAQASGPELCSVSLTSEISDCSVFFNYSQASQPYTRGLPLDESPAGAQETPAPQALEDKQEDWSPEHAMVNLYAEVKNSFKNTGTPQRVLPPVVWSPPSRKKPMLSACNSMMFGHLSPVRIPHLRGKFNLQLPSLDEQVIPARLPKMEVRAEEPKEATEVKDQVETQGQEDNKRGPCSNGEAASTSSLLETQGNLTSSWYNPRPLEGNVHLKSLIEKNQTDKAQVHAVSFYSKDHEVASSHSPAGGILSFGKPDPLPTVLPAPVPGCSLWPEKAALKVLGKDHLPSSPGLLMVGEDMQPKDPAALGSSRSSPSRAASHSSHKRKLSEPPLQLQPTPPLQLKWDRDEGPPPAKFPCLSPEALLETKRAA

SEQ ID NO: 2549 - protein, 222 aa, Homo sapiens
MPLIPTYTLAFPHVKSEIEEVNHMDPSKLKPSGQQPRLYAHTGALEPTCTCEDSQTHTSPSGSILCTLPSSASPEEETVPQSELQLQQSWRRASETPERVRRQTAATNTCVYPSVPALLSVQVSAVGSYRQELPIPARSPGISASALMLPGAFYDYPSQDPTAEDPDRVAWRNYGAPVVPIIWLSLTRPSANKKPKTDLDQNNLEYRSYTMIKRISILDFYS

SEQ ID NO: 2550 - protein, 495 aa, Homo sapiens
MQWSPTPGASACLGWASSLACSTAPTLLGRAGRGPLMAAKWFKEFPLNLKTVSERAKPGGGGGKLRKNSEAGGAGPGPGKGRKNSAAELGSGRAGVGPKDSRLSRDSLQGLIQAAAGKGRKNSRATEEEPHRGATKSSGCSTYINRLIKVDTQEKNGKSNYPSSSSSSSSSSSSASSSPSSLGPELDKGKIIKQQETVIILEDYADPYDAKRTKGQRDAERVGENDGYMEPYDAQQMITEIRRRGSKDPLVKALQLLDSPCEPADGGLKSETLAKRRSSKDLLGKPPQLYDTPYEPAEGGPRAEGKARPPDSRLPENDERPAAEYEQPWEWKKEQIVRALSVQFEGAERPSFREETVRQHHRQKSWTQKILKPALSDHSEGEKVDPGLPLEKQPWYHGAISRAEAESRLQPCKEAGYLVRNSESGNSRYSIALKTSQGCVHIIVAQTKDNKYTLNQTSAVFDSIPEVVHYYSNEKLPFKGAEHMTLLYPVHSKLH

SEQ ID NO: 2551 - protein, 250 aa, Homo sapiens
MVQHQQVRPHPRSDWALQCSYSPFPVPRLSATTTTSTNANTIAVAINAAAHPTRPSANTAATNAMSAAACPLPGPAPAAAADTSTTPPLAAAIVPATSSCSEPTIAAPATPRDGAPELQSPMTRIFKRPYETRLSHEPSGLQPGRAAAVPGQAKAAAQVQGAPAPPEQRDPREPRQQKGCGKTSLLDALTVGSQLCPLETLWKPEIALEKRKHDLEVPKPRLHLVPLTTQQHLAPAAPGHTVLARICSQS

SEQ ID NO: 2552 - protein, 139 aa, Homo sapiens
MLLTIAPPLNPTQMARSALQSPGSAYLRTSLQPLPLLLPGLCLTGKRNSQIKLRPKPALAQVTLIPGSRPPLRTQTLRPTRVLRAALNSQPNTSGGRRSATSPPRPGGGFKMGPLSSGAARVLGKAAATSARRALSMVL

SEQ ID NO: 2553 - protein, 219 aa, Homo sapiens
MGAREIGLREHNLAAGTITARTENRELQNKREISYFILLPGPTLLPAPLTHSRHIYRPRALNQAILSDKDSVGSRKIKKKTLLVGVDSPAITLDTAKTRPRKRASHLFYQGKVKFSKRTLSQLRVLADLRACQGSKEKDLQLPKVTEMNKKEPPMDMSELRMKDHPRQKECRKQHKFTKSRERSAKQEKAGGEDGADSQDLECLLEESGHYVTGKQNYV

SEQ ID NO: 2554 - protein, 459 aa, Homo sapiens
MNTIAKTTPHTKFTKKSEEREMPKGLKPSSGPPPEEEETLFTEMAEMAEPITKPSALDSVFGTATLSPFENFTLDPADFFLNCCDCCSPVPGQKGEPGETGQPGPKGEAGNLGIPGPPGVVGPQGPRGYKGEKGLKGERGDQGVPGYPGKPGAQGEPGPKGDKGNIGLGGVKGQKGSKGDTCGNCTKGEKGDQGAMGSPGLHGGPGAKGEKGEMGEKGEMGDKGCCGDSGERGGKGQKGEGGMKGEKGSKGDSGMEGKSGRNGLPGAKGDPGIKGEKGELGPPGLLGPTGPKGDIGNKGVRGPTGKKGSRGFKGSKGELARVPRSAFSAGLSKPFPPPNIPIKFEKILYNDQGNYSPVTGKFNCSIPGTYVFSYHITVRGRPARISLVAQNKKQFKSRETLYGQEIDQASLLVILKLSAGDQVWLEVSKDWNGVYVSAEDDSIFTGFLLYPEETSGISP

SEQ ID NO: 2555 - protein, 492 aa, Homo sapiens
MLSLEKSKSRGASANKTQLVESLKKTTSGSTNTLKQHQEQWHDVCRQREPEPTRRLLSAPRSMKKKTIQKCIMILRGSGKYMRRDTKPEKTFRWIKQIFGVLLILKQSRVGNWKYLEEDAEEKSARIKPCFRRSPVTEGEWSPWRDWRQTNGLSLPIEIKTTLFAQEEAGSRDLGISKYGHESQMNGTQIHTLSTCYSTGYRYFFVVEEDNTPLSVTVTPCDAPLEWKLSLQELPEDRSGEGSGCGQKGEPRAHNATKPHSKFSSLQSASKKTAGTCNHSFGLLGYRGRGDSAQLESSQTPTKNSCAAWTSSFSPYTQTPSAKPQSRRLSLAAGGGHEPGKGGNSPLGRRAKCVKTVLVMAIISILEDASISKILPLDCGHSEDLSLCHQSDLAPSRRKEAAKDTPAFGTGLGTGTANARCHLRRGKKYVKYTQPSKQTYTEMERLNEELHELKEENKLLKGKNTLANKEKEHYECEIKRLNKVSVRSSMGD

SEQ ID NO: 2556 - protein, 772 aa, Homo sapiens
MGRTLQNTMVNLGLQNACDEAIYQLGLDLEELEEIEEDAGLGNGGLGRLAACFLDSMATLGLAAYGYGIRYEFGIFNQKIVNGWQVEEADDWLRYGNPWEKARPEYMLPVHFYGRVEHTPDGVKWLDTQVVLAMPYDTPVPGYKNNTVNTMRLWSAKAPNDFKLQDFNVGDYIEAVLDRNLAENISRVLYPNDNFFEGKELRLKQEYFVVAATLQDIIRRFKSSKFGCRDPVRTCFETFPDKVAIQLNDTHPALSIPELMRILVDVEKVDWDKAWEITKKTCAYTNHTVLPEALERWPVSMFEKLLPRHLEIIYAINQRHLDHVAALFPGDVDRLRRMSVIEEGDCKRINMAHLCVIGSHAVNGVARIHSEIVKQSVFKDFYELEPEKFQNKTNGITPRRWLLLCNPGLADTIVEKIGEEFLTDLSQLKKLLPLVSDEVFIRDVAKVKQENKLKFSAFLEKEYKVKINPSSMFDVHVKRIHEYKRQLLNCLHVVTLYNRIKRDPAKAFVPRTVMIGGKAAPGYHMAKLIIKLVTSIGDVVNHDPVVGDRLKVIFLENYRVSLAEKVIPAADLSQQISTAGTEASGTGNMKFMLNGALTIGTMDGANVEMAEEAGAENLFIFGLRVEDVEALDRKGYNAREYYDHLPELKQAVDQISSGFFSPKEPDCFKDIVNMLMHHDRFKVFADYEAYMQCQAQVDQLYRNPKEWTKKVIRNIACSGKFSSDRTITEYAREIWGVEPSDLQLQHLPHPEWESGGATCWAPPELCTHLAMY

SEQ ID NO: 2557 - protein, 445 aa, Homo sapiens
MVSMKCSAPLLAQANQDGAIRIFFGFHVLGSHHGCAWGPASTAAGSIQPVDPLSPSSLQQAPRPWAAAAGPKQNDPIEPSEKSEWAFSKASKATLLSCSESFDGSLLPWHEGLALQAGSDEKELEGRLVLLFKSRDSQERRTHVLKKNPGLVRLNVCKSPLERLRISHAKILDVLEQNPKNATYRKHTELFTNEKLVKMVKWLKQNQMLKNKKTDFKCLCGAECDEACLQVHVAVGGWVWLGGAVYDSSGPCTHMSSPTEHRLQTPIFLAQAQAQEANSTAFKIQPRDKSDHSSVVEATGQVQTEDKLYRRSPVTKAEAPITKAPDPPSIVNPSAESPEDYQVTRQQGEAKVKPASSGGAFAFSLYAPGAPEDGCGFADRESAAWTCQRCRSEVSTGEPGWAPPGRDICFQSAALLPEKGTIEFRTPAHRLKSKLLSQAPKASVT

SEQ ID NO: 2558 - protein, 237 aa, Homo sapiens
MAAASGSVLQRCIVSPAGRHSASLIFLHGSGDSGQGLRMWIKQVLNQDLTFQHIKIIYPTAPPRSYTPMKGGISNVWFDRFKITNDCPEHLESIDVMCQVLTDLIDEEVKSGIKKNRILIGGFSMGGCMAIHLAYRNHQDVAGVFALSSFLNKASAVYQALQKSNGVLPELFQCHGTADELVLHSWAEETNSMLKSLGVTTKFHSFPNVYHELSKTELDILKLWILTKLPGEMEKQK

SEQ ID NO: 2559 - protein, 325 aa, Homo sapiens
MVRALNHTEILKLNNTSQQLLEIKSKNVFQYKAMVGRGVLKQEGRGPPSSPPSSPPSSPPAAPQQPPSSPPSSPPSSPPAAPLAAPQQPPSSPPSSPPSSPPAAPLAAPYPPAAPPAAPQQQPAAPAEPAATFEKKTAVPPTYADLGKSARDLDLKTKSEDGSEFTSSGSANTETTKVTGSLETRYRWTDYGSRSTEKWNPDNTLGTEMSVDVGYRTDEFQLHTTVNDGTEFGGSIYQKVNKKLETAVNLVWTAGNSNTRFGTAAKYQTDPHACFSTKVNNSSLIGLGYTQTLQPGIKLTLSALLDGKNVKAGGHKLGLGLKFQA

SEQ ID NO: 2560 - protein, 301 aa, Homo sapiens
MHQNVLICISSEMPGGPLHFLLESASPQLPLSEQQPKTHQKSVDSAHIPDSQASALLGPIQRADSTESYRLQDSSPMPPIREGNVFIPWSLKKILPGATGLSSTPDTRSPVRCVWPQLAEECTCQTLRGFEEHSSSKMGTGASEKQAEQKVRRAFEASEEAHGTLAASTPWVAMGSAYGSCTCLGAQPVTDLALWPVIYSCMGFSPQAYPAFWAYPWVLYGGYLWMGYPPPAALVPSVWLYWRGASSFDPLIGSPYLAALAPNLFPFPMKFPPTYSLASPTLGGATSSHCPQRGHPEELPT

SEQ ID NO: 2561 - protein, 180 aa, Homo sapiens
MKSVANRQSLALKMFIVGHEGRSVDGSVQTPICRRIQSLNSLHLPERQHSRPSSVPSLADGAHGQNEKDMSLKISHRASRQRVHRPHQDQGREHQYKNTSNVCHKAILTAPSPGGGGRLRGHKSELTAAVMQRVLPQDVHPDTRGKKSHWATQASAPHVLTPPTTALPLQLRPKLPSNKP

SEQ ID NO: 2562 - protein, 255 aa, Homo sapiens
MFSAGGTGAVGAPQACRSRDRAPATADMEAGMVQGSWSPEPPAHASGKLRETWAGPVPARSGHTAKVLDLRMTSRVFRKEEDSSHGAPEQIGLSRHNCAVVAVSAGRALPEAQGPSLIRPPRALILSPRAIPPARDLFSSGQPPEEGDLRGSHIHQEHSVKQDQSVLAVSRPQPTLKPERNTRSPPQARGPQLPQGPLTSCHSDKAGRIQVPSVTRKRFGGSQVPSPSPWSVTDDGRFRRSPPGSAQSLPVSHLG

SEQ ID NO: 2563 - protein, 898 aa, Homo sapiens
MCQDETALLGAGKRGGFLLRIPGAGVGERVMLQTPLDWACSILPPMKHCTHLSEADASVAPGTMLPSDRCPLPDLRRYQGVIRGQNRAIWSHGWRSLCVHTALNTSRARTWPRSKQSGAVRFQSQRVRSSVCTEALRRPRALGKATCQHSLVLPELLLQGKDSLLKTIDRLTKMHATEEHGHIGNPTTVQTGDGSLLCSEAASPGKWMNGTARDGEASRLKLTLGDSTFKVLFSFHFLRIAAEQSRMEGGFVLLPIRVPGRFFIRCPLLGAVLAVVELEAFSKGSEAAHLEFSALPTARSNLHIAFSPARSWRLLSSDPPQRAYRLSSHLTVQEKRERRPLPLLYICPRDPLKEECEKGRTAETPPNGRSSVSGMLGLGGVSQGCPSWSDLHPVKILLRACRDHGNRKVLTLQYFMDGRSHFQDYGAAFYANRNIRISKYRRKKPSGAREEEETIPEHLQCKPYWTPEPPSSAVESILLLLHLRGNLWMCNLFLKAQTHPSDYTGTPEGSTKPRESQNPGVARESGFTITSLPTHSPQKEPSLGWGRREQSFYRGILRRGPWKPHSSSCVPGGEPGREAGVGAHALPPSPWPLRLCVGAHALPPSPWALRLCVGAHALPPPSISVAFASLCGCTCAPSISVAFASLCGCTCAPSISVAFASLCGCTCAPSISVAFASLSGCTCPPSISVAFASLSGCTCAPSISVAFASLSGCTRSFSILMGSALCLCTRSCSVFGPENCPCGGGQARAQATGRRPITLGSQGWCLQALTWNSLKRLLTGMMAAKGTICEQWPMCRPPRTRPALCSGRAEQARPGQVGGCGQGPGHLHPEHQVEDEKENPGLCIPEEKQLRCPRAIASFFDDTMKVQRRRGTHKVSQLHISGKSKLFMSLGNLPGKGN

SEQ ID NO: 2564 - protein, 188 aa, Homo sapiens
MGGSSPLQEGLVGGVAELSVQGPAVPKTTPGCAQTPCGAGSPDTALDPGGSTSPQKLDSPSAQGTPDPSPLANPRHLAGEHVKRQTAAWVPTNRDSTVPSDPWDCKRRPWPLLVLRPLAPGTKAPPGGQNGRGRQKGSPCSRRLLLEPAGPLGPASVRCIRTTTPQASGRTSGENDITLERSPFELLS

SEQ ID NO: 2565 - protein, 574 aa, Homo sapiens
MGPDSDILELVQDVINRVTDVFAKHWRADPHLTSVTSKAPCGSLVVGLATPLRREVHLTALPNCFFVFPEETGWGGKGDRDISPSLRSKRCSPPVTPKPMYPDGNSIVKETSIFIGKEGLGQDEPPCPVHSQSHRPCLSSHLGKLMYALLARRLTAFVSITSNSKFRPSTVGPSDVDQWWSARIYRPQAQQVQCPMATFFQDSSSNPSCRCLHSPENLPDPQSPVTARPRKSWEDRVPLAEKESIILKAAPGVIAKSSFSEFMLKPWKASATMIEGDMEEAKPSWPANVTSHDEPLILMGLLIRRFKIKREALTLLALAMGEGKESKPGLIRDPDGCKKSSWGRFNPSLFQKEGDRGMPILSQLQGTRAFNKHCLRAAPAGHSSLESPTNMPSPSPDYFTWNLTWIMKDSFPFLSHRSRYARLHQHREWEKGCQQSWSAECMLSCALDMSVIKTNRTHLLPSRSSGGRGNLPLGMTTSPCLGAASPEQRQAEWSVGLIVSAQERRRNRPLLSVVLQMRYSDGRKTPRTVRGRPPGGAEGRFYSLYLIGTELEEGEGERFKKHTRSRTSEEAQGK

SEQ ID NO: 2566 - protein, 576 aa, Homo sapiens
MRQTVATGVIKAVDKKAAGVGKLSEEAVEDGLFHEFKGFRDVRVKINQLSGSGSGDELVAFVNFPQPEDARTEAVHGSRHHSCSPLDKDIYPPSASVVGASVGGHPHSPGGGGGQRSLSSGGAALGYRDRELERKGDYLFYERVPPAYSLKPREGAEADAAPFRKVDEMSPKDHHRTNQMLFLGNLDTTVTESDIRRAFDCFGVITEVDIKSPFLGQSSNYSLLKFENLDMSHRAKLAMFSKIIIWNPIKIGYGKATHTTHLWDFPLGGPDHHLRLDFADTKRRYQQQYMQPLPLTHYELVTDAFGHQAFDPLRDWVPPPPPIGEGSTGTAATAVPAYEPLNSLDHRRDSCWSLDRDRGDQDLPSSRDQPAEWIGSTTEGKNLLKKEDHTDGSGPSTNTASWKLKSPSQKQDEGTAPVAAASPKLCLAWQGMLLLKNSNFPSNIPICSCCRVTSKWLAVFLWRAKVAQLRITQCLCLDQPKLDEVTRCIKVAGPNGYAILLAVPGSSDSRSPSSSDTVTSTKRLLRSLVSYLKQKQLSHQFLDSKALAKSEEDYLVMIIVHAKLVEQQMEMWNSKL

SEQ ID NO: 2567 - protein, 125 aa, Homo sapiens
MGPGGPLLSPSRGFLLCKTGWHSNRLLGDCGPHTPVSTALSFIAVGMAAPSMKERQVCWGARDEYWKCLDENLEDASQCKKLRSSFESSCPQQWIKYFDKRRDYLKFKEKFEAGQFEPSETTAKS

SEQ ID NO: 2568 - protein, 184 aa, Homo sapiens
MSLVSLEAEMPERTLKEQDLTSAFVAEWCDQWGQMPRSLLSPYIIIVCGSPGIAKQASHVAVIGLLRDLAESEPPLPQIYTVISMVNQEQGGEDSRSIQSQILPVGSESEHLEEASLRSREGFVDLISLVFRKSWGKMLHPRVPAETVCGEKRLAEVTGCLCSKCRQLRSTSDSAEGLRDKSGK

SEQ ID NO: 2569 - protein, 396 aa, Homo sapiens
MTTTTTFKGVNPNSRNSSRVLRLLGGGSNFSLGFDEPTEQPVRKNKMSSSIFGTPEENPPSWATLAENTNKNKNQFLPSWWGQMVKPASTLRITSTMREAEPKRYVGTKEGRRRSQDQPLMGAASREECGLGQGRGFDSTVSSWDGEKFSVGTESFSRPEGLERKRIREAKGLLVAQKGSSMAGAKDDLWETVGGNEVREINVVVMPRMEPNVETESRKSGENPLTVTQIGSDESPEAALGKERKEQAVGEFPEVEGGKEKETGGMSSVYEHVQGMGAREGFTSPGKAQGTQSESSRAQQCPELTDGIRKSSSSQPQAVFKIGVVAPPAKATLPTDLVTNLGDQRTLISKGLDPVKQRSVATDRFPESELPLLESKARRNPVWTYFIPQDRAALIE

SEQ ID NO: 2570 - protein, 104 aa, Homo sapiens
MKPPDNFIEAGLESIFTYWHRDAEAAAYSSRRLEEQWPWGPASLREQERLKERRPRQALRLSQKCQNSFALQQCGNVCPRTPLKLLCRMSVESTGHSPMDSLEM

SEQ ID NO: 2571 - protein, 268 aa, Homo sapiens
MVYMFEYDSTHGKFHGTVKAEKGKLVINGNPITIFQEQDPSKIKWGDAGAEYVVKSTSGGATRVIISAPSADAPMFVMGMNHKKYDNRLNIVSYASCTTNCLVPLGEVIHDNFGIVERFQNTVHAITATQKIVDGLSGKLWCDGCGALQNITPASTGTAKAVGVISKLNKKLTDMGFCVHITNVSVMDLTCRLEKPAKYDDIKKGIWGDTEHQVVSSDFNRDTHSSTFDAGAGIALKDHFVKLISWYDNEFGYSNRVVDLMAHIASKE

SEQ ID NO: 2572 - protein, 260 aa, Homo sapiens; identical to SEQ ID NO: 2402

SEQ ID NO: 2573 - protein, 118 aa, Homo sapiens
MKPVQAAPTPAVRRKESSGGPGAHGGPSLRQSSPGRARSPAAAEFRQRPRTARRASPGPRRKAGRRGSTYSDTILARSSSHTHSFLGERPRRRAVVNTHSSAALYSHARQPTYALPPE

SEQ ID NO: 2574 - protein, 1259 aa, Homo sapiens
MANGVIPPPGGASPLPQVRVPLEEPPLSPDVEEEDDDLGKTLAVSRFGDLISKPPAWDPEKPSRSYSERDFEFHRHTSHHTHHPLSARLPPPHKLRRLPPTSARHTRRKRKKEKTSAPPSEGTPPIQEEGGAGVDEEEEEEEEEEGESEAEPVEPPHSGTPQKAKFSIGSDEDDSPGLPGRAAVTKPLPSVGPHTDKSPQHSSRPCSELRDGDGTTDLALSSPRLLCCLPSSPSPRARASRLAGEKSRPWSPSASYDLRERLCPGSALGNPGGPEQQVPTDEAEAQMLGSADLDDMKSHRLEDNPGVRRHLVKKPSRTQGGRGSPSGLAPILRRKKKKKKLDRRPHEVFVELNELMLDRSQEPHWRETARWIKFEEDVEEETERWGKPHVASLSFRSLLELRRTIAHGAALLDLEQTTLPGIAHLVVETMIVSDQIRPEDRASVLRTLLLKHSHPNDDKDSGFFPRNPSSSSMNSVLGNHHPTPSHGPDGAVPTMADDLGEPAPLWPHDPDAKEKPLHMPGGDGHRGKSLKLLEKIPEDAEATVVLVGCVPFLEQPAAAFVRLNEAVLLESVLEVPVPVRFLFVMLGPSHTSTDYHELGRSIATLMSDKLFHEAAYQADDRQDLLSAISEFLDGSIVIPPSEVEGRDLLRSVAAFQRELLRKRREREQTKVEMTTRGGYTAPGKELSLELGGSEATPEDDPLLRTGSVFGGLVRDVRRRYPHYPSDLRDALHSQCVAAVLFIYFAALSPAITFGGLLGEKTEGLMGVSELIVSTAVLGVLFSLLGAQPLLVVGFSGPLLVFEEAFFKFCRAQDLEYLTGRVWVGLWLVVFVLALVAAEGSFLVRYISPFTQEIFAFLISLIFIYETFYKLYKVFTEHPLLPFYPPEGALEGSLDAGLEPNGSALPPTEGPPSPRNQPNTALLSLILMLGTFFIAFFLRKFRNSRFLGGKARRIIGDFGIPISILVMVLVDYSITDTYTQKLTVPTGLSVTSPDKRSWFIPPLGSARPFPPWMMVAAAVPALLVLILIFMETQITALIVSQKARRLLKGSGFHLDLLLIGSLGGLCGLFGLPWLTAATVRSVTHVNALTVMRTAIAPGDKPQIQEVREQRVTGVLIASLVGLSIVMGAVLRRIPLAVLFGIFLYMGVTSLSGIQLSQRLLLILMPAKHHPEQPYVTKVKTWRMHLFTCIQLGCIALLWVVKSTAASLAFPFLLLLTVPLRHCLLPRLFQDRELQALDSEDAEPNFDEDGQDEYNELHMPV

SEQ ID NO: 2575 - protein, 524 aa, Homo sapiens
  VARIANT 197, 208: Xaa = Any Amino Acid
MAEHAPRRCCLGWDFSTQQVKVVAVDAELNVFYEESVHFDRDLPEFGTQGGVHVHKDGLTVTSPVLMWVQALDIILEKMKASGFDFSQVLALSGAGQQHGSIYWKAGAQQALTSLSPDLRLHQQLQDCFSISDCPVWMESSTTAQCRQLEAAVGGAQALSCLTGSRAYERFTGNQIAKIYQQNPEAYSHTERISLVXSFAASLFLGSXSPIDYSDGSGMNLLQIQDKVWSQACLGACAPHLEEKLSPPVPSCSVVGAISSYNVQRYGFPPGCKVVAFTGDNPASLAGMRLEEGDIAVSLGTSDTLFLWLQEPMPALEGHIFCNPVDSQHYMALLCFKNGSLMREKIRNESVSRSWSDFSKALQSTEMGNGGNLGFYFDVMEITPEIIGRHRFNTENHKVAAFPGDVEVRALIEGQFMAKRIHAEGLGYRVMSKTKILATGGASHNREILQVLADVFDAPVYVIDTANSACVGSAYRAFHGLAGGTDVPFSEVVKLAPNPRLAATPSPGASQVRDHQNLFVAFAL

SEQ ID NO: 2576 - protein, 1090 aa, Homo sapiens
MIEYANFIKGSDIFITNQMDFKPHSLASTKFPTADNSTNNEFDSPSSVNRETTNIPKTETDETYSELQRIIKAFSPTRISQHRIYKERKITNPSDQDDPAAKFDISHITNTTDLSLAMEKPLPSVTELNSLSTSDNNVKKKVYISEAEVSRSNDQSSSPEVTTKEGTIIDTPTGTYGLPWKSTLLPSNFTTLTSSSKDCEFNPVIKMKKDTTTTNNNITPGERNSSSDKFKLSPATIISTKGMKNIIYNSRYGDKTFIEKDISIEVVPFIENISKETNDTPLADGNIPNNENMITIMPVDSALEYDEDNDVFAPVEKRSVLLIEETIVTNNSNALESHEFYAGAAASETFSQGTPIDISTRKKHQILIFKEENPNNDITVLKGSTANFNTKTPSVAPNVAKATISARFDPNKLKTNLADALHSQSSIIPLIEVNVIPDDNLSFISKDTKEANNRASIIFTSMNEPTSTVVDSTVPSTEGSYVSGDFMLPGEDNVKSRGFQSLLRTNMLLLDSLNENPETPGLMRDNSFSESSITRSEELERATEYVGAINGGNVPEKQVIITQTNIHSYPLAWQVSPIESTFSNNPTDSEINFSFSVNGNTPGNYETETDEIYSKSQRAIEKAFSQIKESQNSVYKIRKIANLSDQEDPATMFKLSHFTNTTVLIPAIWKIPPSATKLNLLSNSDSDVDEEFHMSEAGNSFSEDTSKLKDDSFTVKFDDTSFKSQAPPNLKGISSVYSTSTLSEASRPNDQSSAFHIRVSNTGRSSTNTPARLHGLQWRPTLPSDFTTSMDAPIYYELTPVTIMGKDITKKIDYSFLPEETIIPSDQVIILPITITSENSMASTFKENIFKHKDFIDSEQAAEYEKNYFIKDISERMDDISSEGKITPAYVDDIITTSDDSGSEYVSDNSVLELEDKANNSFIKMSTLRYSPKMHRSQALYTTVAASDSLSKATSSEFEAKENLPSESVMSLKPTSVGVPETLILTANSRTKDTAAPRLAKSENLHHHPTMLISTASEPMPTYFAYFKEGIISGRQNIKSQIVLNALPLVCIVLQAASTDSSDNTGDVKPNTSATLITRYKIFDIDASAI

SEQ ID NO: 2577 - protein, 479 aa, Homo sapiens
MMIVFSSHLQMASFFGKMINLSEPDTIDERAINKKKLTPFTISENLNLALNSASAIGCTVVNIGASDLKEGKPHLVLGLLWQIIKVGLFADIEISRNEALIALLNEGEELEELMKLSPEELLLRWVNYHLTNAGWHTISNFSQDIKDSRAYFHLLNQIAPKGGEDGPAIAIDLSGINETNDLKRAGLMLQEADKLGCKQFVTPADVVSGNPKLNLAFVANLFNTYPCLHKPNNNDIDMNLLEGESKEERTFRNWMNSLGVNPYINHLYSDLADALVIFQLYEMIRVPVNWSHVNKPPYPALGGNMKKIENCNYAVELGKNKAKFSLVGIAGQDLNEGNSTLTLALVWQLMRRYTLNVLSDLGEGEKVNDEIIIKWVNQTLKSANKKTSISSFKDKSISTSLPVLDLIDAIAPNAVRQEMIRRENLSDEDKLNNAKYAISVARKIGARIYALPDDLVEVKPKMVMTVFACLMGKGLNRIK

SEQ ID NO: 2578 - protein, 443 aa, Homo sapiens
MAGGLAGIGGIQHEKETMQSLKDCLASYLDRTIQNLRIQIFANTVDNACIVLQIDNARLAADDFRVKYETELAMRQSVENDIHGLRNVIDDTVTRLQLETEIEAVKEELLFMKKNHKEEAKSLQAQIASSGLMVEVDAPKSQDLAKVMADIRAQYDELAQKNGEELDKHWPQQIEESTTVVTTQSAEVGAAETTLTELRLLGDDLDSMRNLKASLESEEQPEGGGGPLRPADGAVQWDPAAPGVRAGTDPGRGTAPGPGVGGPAERQDGEDFNFGDALDSSNSMQTIQKTTTTHRTVDGKVVSETHDTKVLRHSANRSRVPFGEQEANKKFRVCCQTAIRSECFAVYPDLAFARKAYWVQCGTILRTRPWVLDYYCNREINIFHGCAHQQKEAAQAEALPLAFQITCGYPDKQMLLILKMEFQFSSRIPGAFRSTIHVKWVLG

SEQ ID NO: 2579 - protein, 191 aa, Homo sapiens
MPESSDRNENTGRATLAAVGTMERRPFENELDHEGGAAFAREETLHQTDLFSTQSDHTFLLMTKSSLHGSTVKEEFSESIYLGCAFIPHTHRPHKDDAAEALGNWLFHPGCLIGEWLRLEPMSSHPRCITVAVTLSGESVGRADMSGALPDEENGGSPGEYKGALGNDLGDYRELSLFTCTQKSCGIYQSH

SEQ ID NO: 2580 - protein, 180 aa, Homo sapiens
MSSGVRDFASFAGCGGRGLSAPRAAKPQCRTPTKLPCWAQLSGGTFNTAVVLPDRTTQVPPPTGSNGKIFYCLIEGNRNATTFTRIMMGIDGCSWWNPVHSLMEVDVLQREGTVSRNVAVKFSHSKPGTPAGRLASAMHEAKYLIPNICKDNKGMQLESAAVCTDTRSDIGDTGTTVKLY

SEQ ID NO: 2581 - protein, 748 aa, Homo sapiens
MNLLYRKTKLEWRQHKEEEAKRSSSKEVAPAGSAGPAAGQGPGVRVRDIASLRRSLRMGFMTMPASQEHTPHPCRSAMAPRSLSCHSVGSMDSVGGGPGGASGGLTEDSSTRRPPAKPRRHPSTKLSMVGPGSGAETPPSKKAGSQKPTPEGRESSRKVPPQKPRRSPNTQLSVSFDESCPPGPSPRGGNLPLQRLTRGSRVAGDPDVGAQEEPVYIEMVGDVFRGGGRSGGGLAGPPLGGGGPTPPAGADSDSEESEAIYEEMKYPLPEEAGEGRANGPPPLTATSPPQQPHALPPHAHRRPASALPSRRDGTPTKTTPCEIPPPFPNLLQHRPPLLAFPQAKSASRTPGDGVSRLPVLCHSKEPAGSTPAPQDKAVSYTMVYSAVKVTTHSVLPAGPPLGAGEPKTEKEISVLHGMLCTSSRPPVPGKTSPHGGAMGAAAGVLHHRGCLASPHSLPDPTVGPLTPLWTYPATAAGLKRPPAYESLKAGGVLNKGCGVGAPSPMVKIQLQEQGTDGGAFASISCAHVIASAGTPEEEEEEVGAATFGAGWALQRKVLYGGRKAKELDTEVEDGARAWNGSAEGPGKVEREDRGPGTSGIPVRSQGAEGLLARIHHGDRGGSRTALPIPCQTFPACHRNGDFTGGYRLGRSASTSGVRQVVLHTPRPCSQPRDALSQPARERDGKLLEVIERKRCVCKEIKARHRPDRGLCKQESMPILPSWRRGPEPRKSGTPPCRRQHTVLWDTAI

SEQ ID NO: 2582 - protein, 511 aa, Homo sapiens
MAVNGQRGPGRELHDVIKNRTVSIKGPDPREHHGVAVGRIRADQEVLRQCREEGMLSVTRVTANQLLVSQTSGTADPHSLSPGTLSDSLEDPLRGSLSPGTLSDSLEDRLCGSLAASAPGPSVILWRTLCVAASQPQPRDPHLSPGTLSDSLEDPLRGSLSPGTLSDSLEDPLRGSLSPGTLSDSLEDPLRGSLSPGTLSDSLEDPLRGSLSPGTLSDSLEDPLRGSLSPGTPSDSLEDRLCGSLAASAPGPSVILWRTLCVAASQPQPRDPHLSPGTLSDSLEDPLRGSLSPGTLSDSLEDPLRGSLSPGTLSDSLEDPLRGSLSPGTLSDSLEDPLRGSLSPGTPSDSLEDPLRGSLSPGTLSDSLEDPLRGSLSPGTLSDSLEDPLRGSLSPGTLSDSLEDPLRGSLSPGTLSDSLEDPLRGSLSPGTLSDSLEDPLRGSLSPGTPSDSLEDPLRGSLSPGTLSDSLEDPLRGSLSPGTLSDSLEDPLRGSFAAAAPGPPHHCRRLIL

SEQ ID NO: 2583 - protein, 129 aa, Homo sapiens
MADSGDAGSSGPWWKSLTNSRKKSKEAAVGVPPPAQPAPGEPTPPAPPSPDWTSSSRENQHPNLLGGAGEPPKPDKLYGDKSGSSRRNLKISRSGRFKEKRKVRATLLPEAGRSPEEAGFPGDPHEDKQ

SEQ ID NO: 2584 - protein, 236 aa, Homo sapiens
MDTPPRRSRQLEGLGPESLQSLTSVSRRRWVLVEFELDTEETREPGSPPSVQQAGLGPPERTLERSPGSPSLCSRCQQGLHLESPQRQLESSPQSPRCQPKPSEEAPKCAQGQGVPGLGVGPNKEELIPGGPPASATAGPRITRALTPVRKLRGQHEQSKPPPAGEMVTDGFGAKKPKGSSSQAPASKKLKEEELPVIPKGKPKSGQDKPLRISWQRKMKQERKLAKDFARHLEEE

SEQ ID NO: 2585 - protein, 127 aa, Homo sapiens
MMGKEERIVRSPDPGLEKFCAPLGLCGPFASTDLSLPRLPLHSDPAFPSVNQNITNCLRIRPTSSPKPGCDRRKPKPELTFPRTRRAPWTRRNPAEKAPRSGEGLPAPSSLPRALSCLPEGVKSLWR

SEQ ID NO: 2586 - protein, 221 aa, Homo sapiens
MDGTLLRETPTTGPGEERGRPHGGFRCSSGWKSQKRMYQRVVSTHTPSVGRGAAEGRVAFQFESRPEMFERTKESSPMSLDVQNLPIADPDWQRSCHTHAEPESRCLSKTQIGCPLFSSGKPYPPPLKTGVICPAALHFYSTFGTSHTKTCVLVTCQPSQPGCLAISHRRGGAPGCSRRPKRAKEPKQIGETEFQPRSYLLNTQGPMVATHTNALIHNMKD

SEQ ID NO: 2587 - protein, 753 aa, Homo sapiens
MKERKRHLGDTKHFCPVVLKENFILQPGNTEEAAKYREKIYYFSSAEAKEKFLEHPEDYVAHEEPLKAPPLRICLVGPQGSGKTMCGRQLAEKLNIFHIQFEEVLQEKLLLKTEKKVGPEFEEDSENEQAAKQELEELAIQANVKVEEENTKKQLPEVQLTEEEEVIKSSLMENEPLPPEILEVILSEWWLKEPIRSTGFILDGFPRYPEEAQFLGDRGFFPDAAVFIQVDDQDIFDRLLPAQIEKWKLKQKKKLERKKLIKDMKAKIRVDTIAKRRAELILERDKKRRENVVRDDEEISEEELEEDNDDIENILEDEFPKDEEEMSGEEDEEQETDAIERLRGELGEKFEADTHNLQIIQLSEGETIKPVENAENPIYPVIHRQYIYFLSSKETKEKFMKNPIKYIRQPKPKPTVPIRIIIVGPPKSGKTTVAKKITSEYGLKHLSIGGALRYVLNNHPETELALMLNWHLHKGMTAPDELAIQALELSLMESVCNTAGVVIDGYPVTKHQMNLLEARSIIPMVIFELSVPSKEIFKRLLLEKENEQRLPYPLHNSAQIVAVNNVKYRKNIGEIRQYYQEQHQNWYVIDGFHSKWWVWNEVIKNVQMVNKYMQTYLERIKAGKAACIDKLCITPQELLSRLGEFEQFCPVSLAESQELFDCSATDSLEFAAEFRGHYYKMSSQEKLNKFLENPELYVPPLAPHPLPSADMIPKRLTLSELKSRFPKCAELQGYCPVTYKDGNQRQVLAFMEV

SEQ ID NO: 2588 - protein, 202 aa, Homo sapiens
MAAYKLVLIRHGESAWNLENRFSGWYDADLSPAGHEEAKRGGQALRDAGYEFDICFTSVQKIWRRSYDVPPPPMEPDHPFYSNISKDRRYADLTEDQLPSCESLKDTIARALPFWNEEIVPQIKEGKRVLIAAHGNSLRGIVKHLEGLSEEAIMELNLPTGIPIVYELDKNLKPIKPMQFLGDEETVRKAMEAVAAQGKAKK

SEQ ID NO: 2589 - protein, 458 aa, Homo sapiens
MARGPQTLVQVWVGGQLFQADRALLVEHCGFFRGLFRSGMRETRAAEVRLGVLSAGGFRATLQVLRGDRPALAAEDELLQAVECAAFLQAPALARFLEHNLTSDNCALLCDAAAAFGLRDVFHSAALFICDGERELAAELALPEARAYVAALRPSSYAAVSTHTPAPGFLEDASRTLCYLDEEEDAWRTLAALPLEASTLLAGVATLGNKLYIVGGVRGASKEVVELGFCYDPDGGTWHEFPSPHQPRYDTALAGFDGRLYAIGGEFQRTPISSVERYDPAAGCWSFVADLPQPAAGVPCAQACGRLFVCLWRPADTTAVVEYAVRTDAWLPVAELRRPQSYGHCMVAHRDSLYVVRNGPSDDFLHCAIDCLNLATGQWTALPGQFVNSKGALFTAVVRGDTVYTVNRMFTLLYAIEGGTWRLLREKAGFPRPGSLQTFLLRLPPGAPGPVTSTTAEL

SEQ ID NO: 2590 - protein, 110 aa, Homo sapiens
MLAVDAVIAELRKQSKFVTTPEEIAQVATTSANGDKEIGNIISNAMKKVGRKGVITVKDGKTLNDELEIIEGMKFDRGYISSYFINTPKGQKCEFQDAYVLLSEKKISSV

SEQ ID NO: 2591 - protein, 141 aa, Homo sapiens
MAPKVFRQYWDIPDGTDCHRKAYSTTSIASVAGLTAAAYRVTLNPPGTFLEGVAKVGQYTFTAAAVGAVFGLTTCISAHVREKPDDPLNYFLGGCAGGLTLGARTHNYGIGAAACVYFGIAASLVKMGRLEGWEVFAKPKV

SEQ ID NO: 2592 - protein, 104 aa, Homo sapiens [sequence omitted]

SEQ ID NO: 2593 - protein, 563 aa, Homo sapiens
MTPPPPSPLLGTQVKEDRADYKEFQDFSSLPDTHNIAWDHSFYPFQEEEEHGVKGVESVLEKGVLDEGVLEAWGCCRRCRHAGWNRSQPSPELAGAVVHARAPAVGCRQRSGHLHVRLKQRLLERPCQEPLGKKYQLELPPLYERARNAEGSKNLPADGQGLRAVRADAALPVWPGGRGALDHMTVCLQSSLCLGKRLLAVQEILAAQEILVTRRGAPEAGAEGQHQGQWPPADTRHLRTPKWPYKVATEEKPEAEEAEKKRQAKVQEKRLPPWKKRTGHDGSLFLMCSSLNQVHRVPWGQHRACQVMLLVSTKQLQRYLHFEKPARPASMGQDPDCFGKSEEKITTSRRGSGGTGKPDLPCSFGMAPVERLDFENPPDPTERRVIPDWIPDSPWSLWAHSRRDLPVGSPSLWPMRQVQCGGESVVGETEAPGVRPDPRPEKDAKPAVSGCQEESWLQSEYDEMHPREEMNVPSLRSGSGCQVSGSPLAKGLHPLQPCHPHYMMWECCLFTLTLGTQACFEVCARRLKLAHFCPDTSLWSCGGQSPPVLCQLLDIISVSRDKV

SEQ ID NO: 2594 - protein, 577 aa, Homo sapiens
MTQFSMDKRQGRSRSVTITNTAVTSLEWVPFHAFAIPRSTLVSQQGATSHTDNTQEMDSPGQEPGFAKEVEVEPGFQPLPQMTLLVPAMCLLLHGACSAKGFCAAPHFLLASPMGKEACSLDTLCEHSRPSIKFPHTAVTISHCEEDLITGKTISYREKPKVGEELDLPQSLKRNPKGCIARRAKPILAAERHKRLILHTSTKENTLLDNRVIECLTMEAVAKFNIMKEREGPSHQPALSPPKARWHILWQKLMFTASLLTFWNPPTTARVTTEAMPFNATEEEEEEFFLLAHNLPLKVMGYNWHKGRRYATGIQRSSSGPAYSSQEVIFANASLLTRKVTQDDTGFYTLQIIKTDFTIEEATGYFRVHLNLPKPYVTSNPAEDEEAVVLTCEPETHGTIYMWWVNSHRLTLSPRLKMSNDNRVLALLSVTRSDTGLYECQRKNVVSTSHSDPVTWMFSANLDGPDEPTTYSSDTYYYAGSNLNLSCLMGSNPSAEYSWLLNGNNQQTGQELFIPQVTTENSGDYLCYVHNPVTNGKNFATKKITVPDTSVQGSSPGLSGRATVSILIEVLASVALI

SEQ ID NO: 2595 - protein, 900 aa, Homo sapiens
MTVAIRRPGVPGAPLPGRAILSMNGLSYGVIRVNTEDKNSALTVQDVGHVMPGGMMCIVKPDGPPQLCKTDEIGEICVSSRTGGMMYFGLAGVTKNTFEVIPVNSAGSPVGDVPFIRSGLLGFVGPGSLVFVVGKMDGLLMVSGRRHNADDIVATGLAVESIKTVYRGRIAVFSVSVFYDERIVVVAEQRPDASEEDSFQWMSRVLQAIDSIHQVGVYCLALVPANTLPKTPLGGIHISQTKQLFLEGSLHPCNILMCPHTCVTNLPKPRQKQPGVGPASVMVGNLVAGKRIAQAAGRDLGQIEENDLVRKHQFLAEILQWRAQATPDHVLFMLLNAKGTTVCTASCLQLHKRAERIASVLGDKGHLNAGDNVVLLYPPGIELIAAFYGCLYAGCIPVTVRPPHAQNLTATLPTVRMIVDVSKAACILTSQTLMRLLRSREAAAAVDVKTWPTIIDTDDLPRKRLPQLYKPPTPEMLAYLDFSVSTTGMLTGVKMSHSAVNALCRAIKLQCELYSSRQIAICLDPYCGLGFALWCLCSVYSGHQSVLIPPMELENNLFLWLSTVNQYKIRDTFCSYSVMELCTKGLGNQVEVLKTRGINLSCVRTCVVVAEERPRVALQQSFSKLFKDIGLSPRAVSTTFGSRVNVAICLQGTSGPDPTTVYVDLKSLRHDRVRLVERGAPQSLLLSESGKILPGVKVVIVNPETKGPVGDSHLGEIWVNSPHTASGYYTIYDSETLQADHFNTRLSFGDAAQTLWARTGYLGFVRRTELTAATGERHDALYVVGALDETLELRGLRYHPIDIETSVSRIHRSIAECAVFTWTNLLVVVVELCGSEQEALDLVPLVTNVVLEEHYLIVGVVVVVDPGVIPINSRGEKQRMHLRDSFLADQLDPIYVAYNM

SEQ ID NO: 2596 - protein, 304 aa, Homo sapiens
MEHSSGQPLTPSQVFARPPFISPAMPQPGVFSVPVGDGASGSWAVGSCRRHHQVTRRGCRCLEFRLLLPWHGLGKLAALHLIALPAGIRPSFQCSTTGKFWRGTSGQEHKWVKEFIAVWMWLLVLISSHNLMSELYSPPIQTNKQFNPAIGSQKEGAFEGRFVLEQFAINSLAPPCFSPEIPWVNTHISVFAERKEPLQASLSSLNHNQYPQIKDYLQTALIRQNKNSFCLSFGAQQQNNKVDQQKKKRNPGARSKDKAEVQSTGHVCYGTAAALNMSNRDNPLSDASEDLQDIEKFIVVLPSY

SEQ ID NO: 2597 - protein, 647 aa, Homo sapiens
MWRVCARRAQNVAPWAGLEARWTALQEVPGTPRVTSRSGPAPARRNSVTTGYGGVRALCGWTPSSGATPRNRLLLQLLGSPGRRYYSLPPHQKVPLPSLSPTMQAGTIARWEKKEGDQINEGDLIAEVETDKATVGFESLEECYMAKILVAEGTRDVPIGAIICITVGKPEDIEAFKNYTLDSSAAPTPQAAPAPTPAATASPPTPSAQAPGSSYPPHMQVLLPALSPTMTMGTVQRWEKKVGEKLSEGDLLAEIETDKATIGFEVQEEGYLAKILVPEGTRDVPLGTPLCIIVEKEADISAFADYRPTEVTDLKPQAPPPTPPPVAAVPPTPQPLAPTPSAPCPATPAGPKGRVFVSPLAKKLAVEKGIDLTQVKGTGPDGRITKKDIDSFVPSKVAPAPAAVVPPTGPGMAPVPTGVFTDIPISNIRRVIAQRLMQSKQTIPHYYLSIDVNMGEVLLVRKELNKILEGRSKISVNDFIIKASALACLKVPEANSSWMDTVIRQNHVVDVSVAVSTPAGLITPIVFNAHIKGVETIANDVVSLATKAREGKLQPHEFQGGTFTISNLGMFGIKNFSAIINPPQACILAIGASEDKLVPADNEKGFDVASMMSVTLSCDHRVVDGAVGAQWLAEFRKYLEKPITMLL

SEQ ID NO: 2598 - protein, 401 aa, Homo sapiens
MQKSQSYGYQNEKEEEEGGLTGTWSPDQWGPRPWEVPGTVATCGLDSLCLWGVREERTVVWGVGPQELQELGGLCIPITQLLPTLPLAALTRVIMPLGQRSQHYMPEEGLEAQGEVPGLVGGQGPVPEEEEAASSSSSLIMGTLEELCAAEALSPPQSMQGASSSPTTIDNTLWNQSDEGSSSQEKEEPITLPIPMSWSPSSERHSDKVSDLVSVLLHKFRIKESVTKAEMVDSVIKNHEDYFAFIFKESSEYMQLIFGIDVKEVVPTGHSYVLVTSLGLSYDGMLVDDPSKPKTGLLIIVLCVIFTEGNCAPEEVMWEALNVIEVYAGREHFIYGEPRKLLTRDWVQENYLEYWQVPRSDPACYEEERVSAGDAARASGGWGGLVHVPGLHPAASPPCVT

SEQ ID NO: 2599 - protein, 116 aa, Homo sapiens
MHKCFFFFEIWEFPPFLQPCAQQFYIHGNYGTPSLAEAACSLKDESKGASKCLEVVSGIDMKEVDRISHSYVLVNSRDLTYDEMLADSQRMLKNGLLIIVLGVIFIEGNGASGEDI

SEQ ID NO: 2600 - protein, 126 aa, Homo sapiens
MPAVPLLRRNIGHTEGALYNVPAMLKRLVIIVKEPMSRPACSWSSQGQTQENNIDDIEVKGKYMGLAIWDTVGQEGQRTLESKRFCPNVYSILVGNKMHLLKDGHIRQDLTKTKQELVKLDGCLEI

SEQ ID NO: 2601 - protein, 488 aa, Homo sapiens
MTVAMVQIENRIIWRTDKSVQRRAIGFMVPALFNPDVTWDRKNDPEPWNKLGPNDQYKLYSAPPPCRRSCTCRPASVAARSGPSFGRLSVTNMGIDPTGTYYRDSDLQPERINVYYNEARGGNYVPRAVLVDLEPSTMDSILSGPFGQIFRPDNFVFGQSRAGNNWVKGHYTEGTELHGALAQSVRYGVEPYNATLSVHQLVENTNETYCINNGALYDICFRTLKLTTSTYGDLNHLVSATMSRVTTCLCFLGQLNTNLHKLAVNMVPFPCPHFFMPGFAPLTSRGSQQYQALREVDKQMLSLQSKNSSYFVQWIPNNMKTAVCDISPHGLKIAATFISNNTDFQELFKCISAQFTAMLWCKAFLHWYTGEGMDEMEFTETDSNMNDLVSEYQQYQDATAEEGEFKQEAEEEEEPRFTPSDSGNHTFNFEGPLSPLTSASPLTPAPHESHFTSRPISPGLCLTPPSELHFTSDLASPLTPDLSPSSYL

SEQ ID NO: 2602 - protein, 115 aa, Homo sapiens
MQPICCRHCAQCMPKDKATKKFVIQNRRGCSYQTFPKGVSSTPACFPRTGDFQLHINVNDGTEYGESIYQKVCENLDTSVHCTWTSGTNCTHFRIVAKYRLDPTASISAKVNNSS

SEQ ID NO: 2603 - protein, 215 aa, Homo sapiens
MWGSAFKGEKMLHLGDFSQSVESKWRVSPVAESPTAVVAIAEAIAHWRVGAAIATANAISQRVAIAAPVASWEDSPGEVVAEHGVGSGGLSIKDKDHSKKSARRWKMYHPSTWEGRKTVIALQVVLCRELIESPVVTGAIGPSVGAVAKARARAPWPIEATTIAAAQVVDVATTKAVAQGAVAIASTAIVQGRAQRHNTVQGGGSEGPMEVGPIE

SEQ ID NO: 2604 - protein, 793 aa, Homo sapiens
MADIEMTLSTQGAKLQETEALSDLQVNTRSCSGRQPDPGACRSLSPTQMVSQMWAFSCSTCKRNSPNRAPAAFRAKSVERTEGRLTARKAGLCRAEGMGPRSLSTSVGLWLKSGSTSALRPANRIPQTVLEGNKVWLPQTQNILATLLHPLIFQVHLHKCARDEGDKDQVTSTTPDPPDSSPDTQPEKLMGNGCFGITEGCGRQHPGGFCLPCGAAAESHTHELMTFYGKYVHPLSRLHGIRIHRLDSRFHGMHIRPLSRFHDVNVPLLSRLCAAVASVGAGQVAWGAGLTERLAPPSGEGVSRTILLHEAKPLAPRHSKKSAKIIEKKRGKKKHTETPKSGSGSGLDVGRTLILPALVQNQTGFQVEGARGPDPGGDQQPGHIVPDQTTSVELAVCFYVSLSPKSSKHFSQILAFSHITFLESKEGRGRSQELTAEEDLQLLVQIVDGASLALKMLKEIESEHPNWLETWKVSFGKLGPPLKLELLSVNAQNLLAKLWLNRRLLPGVLIKNGVGGVVIFSAKGADQTHQGLIVTLLHVPWILGGLVDYVCHLSKEPIDEELWAVGLRQQNKERSTGHSGCDVHFHQEVVLSRDQVWARRRETVDLKACSGDLLERINIKTSLKNLPDTAFQTHLFSPRIISLTLTTHFIRRINRKLTSRCYKRNLSIQRVLEPGSVASVLCVDHWGVGRATGTGRSSFGQAVALEANGVMKRSLDALTLKMLSKHESVHQRVDLTPIRNIPGVRWCEGARRVGEASRSPARRMGTAEITGSAQSRIQDPKITAAPEEYLTTV

SEQ ID NO: 2605 - protein, 466 aa, Homo sapiens
MASLLRRQPAGPVCGKMPSVLLRNGLLCSASFALEASQLGSRTATCRSFRQQGPKRKKPVLNQKSEIEVEEPRHWLPGLDPPRGSPQGMHNTGSCHPQPLLDTAVRAIWGQVTLSWSTLSSWDCELPPKIWEVSQKILARAAHRHTDTRNESSESHMGAGLHNGRPGAPFRPHQTGATMEISAALELVLLLTSMALVAFMETAIVCKGRKVAGSYGSQGTVTVRDHWDRRTDSHSDQIWAPRFVSRGPEAAHSLPELPCLRAPQPALPQEEGQCFLLPVGIGGPSGTGPAAAWRPDVSIPTMAVSRGCVEGQSCWGLGKTRDRLPPVTAGLAVGFWLRKRTSHWFPQSVHPDSGLSTGTWFNVSWLKPWWCQGLKALSPEGSPVGSDLLSSVGYYSFDVFRHWHRGFLTSVFVASWSGGKHPKLRFTDEKAERLIKPFVVPRRVSFGAGSHHRTWLPTTPAEPGSS

SEQ ID NO: 2606 - protein, 596 aa, Homo sapiens
MAMNFGDHASGFRHDDVIRFINNEVLRNGGSPAFYTAFRSRPWNEVEDRLRAIVADPRVPRAIKRACTWSALALSVQVAARQQEELLYQVWWLQGHVEECQATSWALTSQLQQLRLEHEEVATQLHLTQAALQQVLNERDGLCGRLLEVERSMQVYPMPQDFVPGPEAGQYGPVAGTLNAEQSEAVATEAQGMPHSEAQVAAPTAVYYMPEPQSGRVQGMQPLLLMQAPHPVPFHMPSPMGLPYSTPLPPPVVMESAAAIAPQMPPAGIYPPGLWATVGSQEETAPPWDQKCHGQDGYPENFQGVYHPGDNRSCNQKEGSECPQGMTSQGDSSSHSLKKDPVMQEGTAPPEFSRSHSLEKKPVMPKEMVPLGDSNSHSLKKDPVVPKEIVPIGDSNSHSLTKNPVVHKEMVSLGDSNSHSMKKDPVMPQKMVPLGDSNSHSLKKDPMMCQEMVPLGDSNSHSLKKDPVEAQPEESANDAQGDGPPGGKPQPQPEERSSCAQGAGPPGGQQESQDEERSSDAPEDGPPGGQQKPQPEERSSDAPEHDPPGGQQQPQPEERSSDAPEHDPPGGQQQPQSEERSNDAPGDGPPGGQQQP

SEQ ID NO: 2607 - protein, 327 aa, Homo sapiens
MHPKEEPPLGGASLTLPVLAGRKLEGPGLGSAASHDLELQYSRGNRTPTPVCMTATEHQQEVTRAGKGAETGCNMSRAVSITREDRRVPWRSQNKNQGDRPSQGLWENSSQAEVPTLRDILLGLALLSVGDKVPRQQSDEIKWGPWGQDHPSVQVLGGNATFAATERQERAFLRTTPQKDRPKVKTVIHTQEVSETIFMWLKLANTTTQVTPESHCDFRSRMPGAWTHQQDSRDWGSSSPGRQPPPLEAHNTTDEEEKHHRCLKDVQCQDAPKAPALRSRRPSSQRGHNTSPGGPAWGPWGHDAPPAPASLRASPPHEGEEHPKHTI

SEQ ID NO: 2608 - protein, 263 aa, Homo sapiens
MGKLTTMPAGLIYASVSVHAAKQEESKKQLVKPEQLPIYTAPPLQSKYVEEQPGHLQMGFASIRTATGCYIGWCKGVYVFVKNGIMDTVQFGKDAYVYLKNPPRDFLPKMGVITVSGLAGLVSARKGSKFKKITYPLGLATLGATVCYPVQSVIIAKVTAKKVYATSQQIFGAVKSLWTKSSKEESLPKPKEKTKLGSSSEIEVPAKTTHVLKHSVPLPTELSSEAKTKSESTSGATQFMPDPKLMDHGQSHPEDIDMYSTRS

SEQ ID NO: 2609 - protein, 197 aa, Homo sapiens
MRLVVQAEVILSASCLEPLKLWANSKKFKLHLHTLRSIQRPRKKHKDPAESSEAQAKYMRQGARECGGSEFSTMATDSDTAQFGPMTRCRDFHHTKEMANPNWIQGSRDWLIYNARGGGGISVTRKCCLAVQGKGARLPNLRVLVYSDKMRKTAKAVQKSVCVMAANTSACTKLPVSFPKTPALGRTTFAFSRFPIN

SEQ ID NO: 2610 - protein, 590 aa, Homo sapiens
MDKHNFAGRSGSIYEMFGNECCFSTGEVIKITGLKVKKIIAEICEQIEGCESLQPFELPMNFPGTFVKRSKECLFKIVADKTPYLTMEEITRTIHIGPSRLGHPCFYHQKDIKLENLIIKQGEQIMLNSVEEIDGEIMVSCAVARNHQTHSFNLPLSQEGEFYECEDERIYTLKEIVEWKIPKNRTRTVNLTDFSNKWDSTNPFPKDFYGTLILKPVYEIQGVMKFRKDIIRILPSLDVEVKDITDSYDANWFLQLLSTEDLFEMTSKEFPIVTEVIEAPEGNHLPQSILQPGKTIVIHKKYQASRILASEIRSNFPKRHFLIPTSYKGKFKRRPREFPTAYDLEIAKSEKEPLHVVATKAFHSPHDKLSSVSVGDQFLVHQSETTEVLCEGIKKVVNVLACEKILKKSYEAALLPLYMEGGFVEVIHDKKQYPISELCKQFRLPFNVKVSVRDLSIEEDVLAATPGLQLEEDITDSYLLISDFANPTECWEIPVGRLNMTVQLVSNFSRDAEPFLVRTLVEEITEEQYYMMRRYESSASHPPPRPPKHPSVEETKLTLLTLAEERTVDLPKSPKNTGTYGPMMPAVKAI

SEQ ID NO: 2611 - protein, 1328 aa, Homo sapiens
METGQRTSRKVRKLGSNRRRQTREPADGEGAAVAPEPESWSSQAAAELQAFFQDCGAKERGFVTREDLAVAKFSFLGSKEESEMIFDWVDVERKGHLSLEEFSSGLKNIFGSSQSPHRLRRRKPLPSKRVSATTSFPALEEADAEEKEAFLAFMEQLGTGHLLPKQMEIWQLWGQLRQEEPQLAGNLAGFLAKMTSRLQEAQADKEALELTLRKRDSDHHREVQQLYEEMEQQIRQEKQQLQAESDSRGLALTSQMQDVLEAKEREVQRLAEGQRELEAQLSHLRSTHQEAASENQQLQEAKRDLAGRLEEVRGQLQVTRGRLDAARGRVSWQVEEKLRQVAAIPGLGFPGAGEKTPDPQAASPEEAPLPGLFGDNDDWDQLLSNFGSPPHGALQLCWSPPPTPRATSGPQTPRVVRQISISEPQAFLFGQEPSSDPDGAPRTPPGVTFSAKDNKGVDPHEQDIRAEQPVEPHDPDPNQEPGSTPEGRLLWGLSGSLVAPAFKVLIPLEDGPPPPANSPPPQAPAGSSKQIQASDPDDKGPGSWAPPSGAQPGAGAGPQEPTQTPPTMTERETQPGPSPTTALTGVGPAKPPRQRDALQQDLHATGSEPRLGTQRARALTLGPAEPFQGLEFVGPVPTERLEQGQAGPAVQEGLPEGLREAHGQVLGLGELSAFPHQELEEEPRSEEGKQEGRGGQDLSSEQSEQSVEAHGLETAHSELPQQDSLLVSLPSATPQAQVEAEGPTPGKSAPPRGSPPRGAQPGAGAGPQEPTQTPPTMAEQEAQPRPSLTTAHAEEQGPPHSREPRAESRLEDPGMDSREAGLTPSPGDPMAGGGPQANPDYLFHVIFLGDSNVGKTSFLHLLHQNSFATGLTATVGVDFRVKTLLVDNKCFVLQLWDTAGQERYHSMTRQLLRKADGVVLMYDITSQESFAHVRYWLDCLQDAGSDGVVILLLGNKMDCEEERQVSVEAGQQLAQELGVYFGECSAALGHNILEPVVNLASSERNVSAAVSLPSPEAHKKTGNSGSQEVEFWEELHTAQHPLLAFLGRIHLLGRAQLCKDHQPFLLSKGSQAREQDPGTSEQHKVGNDSSRRNLRMEPNATFTTQLTATPERLLRLISAGVCGLILLVGLSANGLMLLVVGRGPGSPHPLHSLTHSLMMNITPSDLLFLACVVPVLLLSFLQHNWWLGPAICTISQATNTATTFCIFYSMVATALLRHVAVARPDLAFPAGWGTLLLLCGAMWALGLTESLPNWLFQRVAVEEETAGAPKTQACLLLLSPAGTSCYISLLGALAFLPCTLGLGCSFSHVGWLLWTQPQGPMGESIQEH

SEQ ID NO: 2612 - protein, 230 aa, Homo sapiens
MGKREENGCFPQMSNCTYQEGVMEGLWALYDSWVSLIEDFMGSSQKKRKKKHIFCGGDFHQKSPPYQSVGGQYQKDPLIPGSLRRYLTVEGTKASSASSETPPFLSSFFSSKREIIVQHYRGYNSVPRNPCMNEKSRNTKDAHPASHLTQSSSDGADEMVQMDPSALERPEGEVSSARRVGGEHNRALSSKGLIVGPGYTPRRLAEELRVREKAVGQSEVPMLKGLSLMI

SEQ ID NO: 2613 - protein, 400 aa, Homo sapiens
MGKEHTHISIVVIGHYAWVLDKLKAECEHGMTIDISLPKFETSKYYMTIIDSPGHRHFIKNMIIGTSQADRAVLIVAAGAGESEAGISKNGHTHEHALLAYTLGGKQLIVDVNKMDPTETPYSQKKYKSLKKSALSLRKLTTAPGTVVAFVPVSGWNGDTMLEPSANMPWFKGWKVTHKDVNASGTKLLEALDCILTPACPTDRPSPLPLQDVYKIGGVATLPIGGVETGVLKPGRNNVAFNVKNVSVKNVHCGNVAGDNKNDPPTETTGFAAQVIILKHPVQISAGYSPLLDCHTDHIACKFAELKEKIDCHSGKKLKDGPKFLKSGDVATKFLNSGDVDMVLGKPMCVEVFSDYPPLGCFAVHDMRWRIAMDVIKAVDKKAAGAGKITTSAQKVQKAK

SEQ ID NO: 2614 - protein, 253 aa, Homo sapiens
MATHRLVMVRHGESTWNQENRFCGWFDAELSEKGTEEAKRGAKAIKDAKMEFDICYTSVLKRAIRTLWAILDGTDQMWLPVVRTWRLNERHYGGLTGLNKAETAAKHGEEQVKIWRRSFDIPPPPMDEKHPYYNSISKERRYAGLKPGELPTCESLKDTIARALPFWNEEIVPQIKAGKRVLIAAHGNSLRGIVKHLEGMSDQAIMELNLPTGIPIVYELNKELKPTKPMQFLGDEETVRKAMEAVAAQGKAK

SEQ ID NO: 2615 - protein, 133 aa, Homo sapiens
MGIDGAPLHRGKVRSPEYQAAGALGDTRTEPSLDQVLQERDEAIAKKQAVEAELQRCKARLHAMEAQLLEVLEEKLRLRRELEAWEEDVQQLVWQQVQNQLQREAKGTRGAHVDPGAASTPRSRFSLGRGRWW

SEQ ID NO: 2616 - protein, 766 aa, Homo sapiens [sequence omitted]

SEQ ID NO: 2617 - protein, 485 aa, Homo sapiens
MGATVSLSEHKAFIHSRAGRAGPGAPLRAALARTPVELAAECAAPALRAAAAGAKILGGGAAAAKSGGGGAKSRGGKKKQTHKKPRRRGEKATAGKKPRRRGQKTAEAGAKSHGVGGKSYGGGAKSRGGEVKKPQKAAAAGGKSRKKQRRRGQKAAAAKSLSGGGKKPRPGEKAAAAGAKSHGGREQKPAGVGAKSRGGGLKSRVSKTRGGGRKKPRRGQKAAKNRGCGGKSRGSRGRKQQKPKAAKSLGGGGWGGAKNRGEGGKKPRCRGKKPWPRRQKPAAAKSPGGADKKPRRWGSKAASAKPMVEGGKKPWRRAQKMQKAAEGAKSCKKQRRRRQNATTEKSLGGGGKNPRKRGEKAAEAGGKSRGGGGKRQRDRGKKPQKSAAAGAKSCKKQRWRGQKASKRSGGGDKKLQKAAAAGAKSPSGKKQRLWGQKAMVAKSLGGGGKKPRRREQKGAGAKNQKNLRQRREKSRGGGGKIVEMG

SEQ ID NO: 2618 - protein, 383 aa, Homo sapiens
MLVARGLSRLLPVESAPFLILHPTPASRARAEAQAAMLVARGLSRLLPVESQLQSSSEWLHQDVWDLYQDMGKKKALACSPDCYSKAPQMEAPLSIDPEALRVAARGEMLNISRHFHLRSLWQEQTPLKQAALSQAGAGLAGCRVPRKHVQAFLWGNQEKWTDWEKASGDQVKPITIIIETVAGKILGPSTGSGRRTDPTSTLTQDDAQTPHPPSPRTTHRPHIHPHPGRRTDPTSTLTQDDAQTPPRSAEPPSSLHLPLAMLPTAGSAEPPSSLHLPLAMLPPAGYAEPPSSLHLPLAMLPTAGYAEPPSSLRIQTQSEKTPDSKAFPITQDKESRKWETVLASASREPQSPHKVSIALDGPWEFLRAPEASGAGGRPHRHF

SEQ ID NO: 2619 - protein, 251 aa, Homo sapiens
MTHIVWEVDRPGSKVNKKEVVEAVTIVEITMVVAGIVGYVGTPRGLWTFKTVFTEHISDECKRHFYKNWHKSKKKAFTKYCKKWLDEDGKKQLEKDFSSMKKYCQKAHVMEIQVNRGTVAEKLDWARERLEQQVPVNQVFGQDEMIDVIGAWHPDRVAFSGARTGQKEYHHCTKINKKIYKIGQSYLIKGGKLIKNNASTDYDLSVKSINPLGGFVHYGEVTNDFVMLKGCVVVTKKRVLTLHKSLLVQTK

SEQ ID NO: 2620 - protein, 199 aa, Homo sapiens
MVFYFTSSSVNSSAYTIYMGKDKYENEDLIKHGWPEDIWFHVDKLSSAHVYLRLHKGENIEDIPKEVLMDCAHLVKANSIQGCKMNNVNVVYTPWSNLKKTADMDVGQIGFHRQKDVKIVTVEKKVNEILNRLEKTKVERFPDLAAEKECRDREERNEKKAQIQEMKKREKEEMKKKREMDELRYVGAVALRLTSKIIP

SEQ ID NO: 2621 - protein, 249 aa, Homo sapiens
MAAKMFEFIGKFGLALVVAGGVVNSALYSVDAGHRAVVFDRFRGVQDIVPRNVPVITGSKDLQNVNLTLRIIFRPVASQLPHIFTSSGEDHDERVPPSITNKILKSVVARFEAGELITQREQISRQVSDDLTEPAATFGLILDDVSLTYLTFGKEFIEAVEAKQIAQQEAERARFVVEKAEQQKKAAIISAEGDSKVAELITNSLATAGDALIELRKLEAVEDITYQLLRSRNITYLRAGQSMPLQLRW

SEQ ID NO: 2622 - protein, 158 aa, Homo sapiens
METVVTTLPREGGVGPSRKMLLLLLLLGPAGSGLSAVVSQHPSRVICKSGTSVNIECRSLDFQATTMFWYRQLRKQSLMLMATSNEGSEVTYEQGVKKDKFPINHPNLTFSALTVTSAHPEDSSFYICSARDTAPGGDQRPRQEPLQLLLHPSRPTEC

SEQ ID NO: 2623 - protein, 127 aa, Homo sapiens
MADLGLGGGGKATRSRGGSGAGGGRLKSRHHEEALQLRETPGPGAPGLHGPRVRWSGVPHPGLGTAEDPQGCHQGRRRGGGALPDAQVPGLGRPRQKRQDCSTFDLCPWPCGSGHPLAEQKMPDQHI

SEQ ID NO: 2624 - protein, 279 aa, Homo sapiens
MATSSLPFAIVLDVLPNVGTELHPNSLSDKTFTAEHISYTSHSINYGRTRVSSMGIHMQNNIGKLEKDLREWRSDKFKLKTQTNKKTSTFRKLEKKIELEKQDCWHSKDFKIEEKANKMLKVDQRAKQQIIQQRKCNQCFPRCFTLEVKCVPFFKATQPSLTQWETCQEGSDLLHSQFAQRQSAKAIPAGFAIFAIKVNLSCSSECTGGMRWADVPQVASNSGTWGRLLCRGQRVWNNFQEAARQEVTMQVCHRVQKGQKCQGLRGGELSQRVSLLSVV

SEQ ID NO: 2625 - protein, 1057 aa, Homo sapiens
MAAKNAGRVLASQTSQENQAAPSPANGTMLNSNAVGSVGPSSGQKIALGKCAGLADWEHFGGTTESQVWGGYVSQKELKKSTVTASLGAEAHGRQRSSLVRIQNKKVLSSGSGEEALALCKAQVAAPRVPEDPPPVRKFALPLPSPPKQVPARLPKETEGRAEEEPRTVTQEHHGYLGNLENSMGCKQNSKILEDKMDNLEHKTEAKANCSTIQPAPAISPHAETSDSLSLATYTLQVPAPPSTLDLAEPATRPRCLSVTPRISKIPNSPLSLPTDLVPIFWVPPNEEGGSSHSGVASASPTSDPLTPSPTPFSFRPPFRREFPTAVYVHSLPPLSSPALLPGPSTRISVTTSKQINFKAVIFTITANTSAHHTLQPPSDPQVLNRDTTFPPKAVMFRTSSSSRMNSLLVSQIDGSAQQGPPATFIFPSPTPQPKFWVPDLAKANCSTPQPAPAVSPPAETSYSLCLATYTSQVPGPPPTPDLGIASAHISTSLPAQPVMRPMTTSNHTVNLGATAPLTLGAPNGQQWKACLPSTPVILSHDGIIMAHPDTSSLGSRTSAASSSIPTIDSSAVDTTLIEKLSSSSLPLSHGRSVSLSHLSLLGSGNTDPSGNIVSVHVSTSLPAQSVVGPTVTSNHTVNQGATAQLTLWAPDGQQWKASLLNGFLRLPRHLQFRKQKKCILSYLGLSASTNKQLNRNTASVHISTSLPAQSVVGPTVTSNHVIHPGATAQLTLGASDGQHWKACLPSTPVFLSLPMMAPLDTSSLGSRTSASSSSIPTIGSSTVDTTPYSKAVVFQSAAVSRKKCILSCLVFHGFGNTEPSGNIVSAHIFTNLPAQSVMGPIPTSHNDDKSDRSFILGNPATPAPVIGLRCSCSQPPSDSTMAADLTSVTLPYFAFDLPINVQPGPGGIMRPGAPKHGENIGVSMSLQFHIKNTENYTRMEGNNQHQPVPPFGQVAWGSPAHTTLVVATNTSTILACSTFMPNTWHAPLQNPGVALGRGNHIPIVGAPRGSFFHQSMVGPPGQNTGSASTVNSTIAIMRGLHVPSQQPSSQGHLDND

SEQ ID NO: 2626 - protein, 191 aa, Homo sapiens
MGRIRKREGREITRQVEEQAVSQTASTYSINQFADLESLKSSFDKTNSLKCEKIVIAESSSLKVICLGNISKGVRLNKEVYRLYDANESKLHNMISSVAKHQLLDEEKPVMSEILSLALVITTYGWHERIAKERPPPYARSGASRRLRVATSRAYAALPAAALTCGSCARDVATAFRNWKPFPHQYFEVTL

SEQ ID NO: 2627 - protein, 209 aa, Homo sapiens
MGSAARARLFSVLADLRVRLSRALQRRAGGEVQTRPPPPSPGRGSELGASAQRPPGPAFLAAPAFGAGLAVGRLRRVGRRGPEKRQPGRNPPIDPLGGPALPRLSSPEPPPAGSDRDWRLRLCLREGEGVLWRRFPLTPPPSGSWACRVSAMGEGCARCLRLPPRRGPPRPPGLPYPGGLAAPRASPPQHPNRAAPPASARRLRSPGPS

SEQ ID NO: 2628 - protein, 1315 aa, Homo sapiens
METGDGVPVSSRVSAKIQQLVNTLKRPKRPPLREFFVDDFEELLEVQQPDPNQPKPEGAQMLAMRGEQLGVVTNWPPSLEAALQRWGTISPKAPCLTTMDTNGKPLYILTYGKLWTRSMKVAYSILHKLGTKQEPMVRPGDRVALVFPNNDPAAFMAAFYGCLLAEVVPVPIEVPLTRKDAGSQQIGFLLGSCGVTVALTSDACHKGLPKSPTGEIPQFKGWPKLLWFVTESKHLSKPPRDWFPHIKDANNDTAYIEYKTCKDGSVLGVTVTRTALLTHCQALTQACGYTEAETIVNVLDFKKDVGLWHGILTSVMNMMHVISIPYSLMKVNPLSWIQKVCQYKAKVACVKSRDMHWALVAHRDQRDINLSSLRMLIVADGANPWSISSCDAFLNVFQSKGLRQEVICPCASSPEALTVAIRRPTDDSNQPPGRGVLSMHGLTYGVIRVDSEEKLSVLTVQDVGLVMPGAIMCSVKPDGVPQLCRTDEIGELCVCAVATGTSYYGLSGMTKNTFEVFPMTSSGAPISEYPFIRTGLLGFVGPGGLVFVVGKMDGLMVVSGRRHNADDIVATALAVEPMKFVYRGRIAVFSVTVLHDERIVIVAEQRPDSTEEDSFQWMSRVLQAIDSIHQVGVYCLALVPANTLPKTPLGGIHLSETKQLFLEGSLHPCNVLMCPHTCVTNLPKPRQKQPEIGPASVMVGNLVSGKRIAQASGRDLGQIEDNDQARKFLFLSEVLQWRAQTTPDHILYTLLNCRGAIANSLTCVQLHKRAEKIAVMLMERGHLQDGDHVALVYPPGIDLIAAFYGCLYAGCVPITVRPPHPQNIATTLPTVKMIVEVSRSACLMTTQLICKLLRSREAAAAVDVRTWPLILDTDDLPKKRPAQICKPCNPDTLAYLDFSVSTTGMLAGVKMSHAATSAFCRSIKLQCELYPSREVAICLDPYCGLGFVLWCLCSVYSGHQSILIPPSELETNPALWLLAVSQYKVRDTFCSYSVMELCTKGLGSQTESLKARGLDLSRVRTCVVVAEERPRIALTQSFSKLFKDLGLHPRAVSTSFGCRVNLAICLQGTSGPDPTTVYVDMRALRHDRVRLVERGSPHSLPLMESGKILPGVRIIIANPETKGPLGDSHLGEIWVHSAHNASGYFTIYGDESLQSDHFNSRLSFGDTQTIWARTGYLGFLRRTELTDANGERHDALYVVGALDEAMELRGMRYHPIDIETSVIRAHKSVTECAVFTWTNLLVVVVELDGSEQEALDLVPLVTNVVLEEHYLIVGVVVVVDIGVIPINSRGEKQRMHLRDGFLADQLDPIYVAYNM

SEQ ID NO: 2629 - protein, 431 aa, Homo sapiens
MSIRVTQKSYKVSTSEPRAFSSHFYTMGSSSFRGGLGRGYGGASGIGGITTVTVNQSLLSPLNLEVDPNIQAVRTQEKEQIKTLNNKFASFTDKIRFLEQQNKMLETKWSLLQQQKMAQSNMDNMFGSYINNLTQQLETLGQEKLKLEVELGNMQGLVEDFKNKYEDEIHKLTEMENEFVLIKKEVDEAYMNKVELGSRLEGLTDEINFLRQLYEEEIRELQCQISDTSAPSLDMDSIIAEVKVQYEEITNHSQAEAESMYQIKYEELQTLVGKHGNDLRRTKTEISEMNRNISRLQAEAEGLKGQRTSLEAAIADAQQRGELAVKDANAELSELEAAQERAKQDMARPLREYQELMNVKLALDIQIATYRKLLEGDESRLESGMLNMSIHTKTTSSYAAPFSSTGSTRAVVVKKIKTRDGKLESSDVLPK

SEQ ID NO: 2630 - protein, 464 aa, Homo sapiens
MLATRRLLGWSLPARVSVRFSGDTTAPKKTSFGSLKDEDRIFTNLYGRHDWRLKGSLSRGDWYKTKEILLKGPDWILGEIKTSGLRGRGGAGFPTGLKWSFMNKPSDGRPKYLVVNADEGEPGTCKDREILRHDPHKLLEGCLVGGRAMGARAAYIYIRGEFYNEASNLQVAIREAYEAGLIGKNACGSGYDFDVFVVRGAGAYICGEETALIESIEGKQGKPRLKPPFPADVGVFGCPTTVANVETVAVSPTICRRGGTWFAGFGRERNSGTKLFNISGHVNHPCTVEEEMSVPLKELIEKHAGGVTGGWDNLLAVIPGGSSTPLIPKSVCETVLMDFDALVQAQTGLGTAAVIVMDRSTDIVKAIARLIEFYKHESCGQCTPCREGVDWMNKVMARFVRGDARPAEIDSLWEISKQIEGHTICALGDGAAWPVQGLIRHFRPELEERMQRFAQQHQARQAAS

SEQ ID NO: 2631 - protein, 207 aa, Homo sapiens
MALLFARSLRLCRWGAKRLGVASTEAQRGVSFKLEEKTAHSSLALFRDDTGVKYGLVGLEPTKVALNVERFREWAVVLADTAVTSGRHYWEVTVKRSQQFRIGVADVDMSRDSCIGVDDRSWVFTYAQRKWYTMLANEKAPVEGIGQPEKVGLLLEYEAQKLSLVDVSQVSVVHTLQTDFRGPVVPAFALWDGELLTHSGLEVPEGL

SEQ ID NO: 2632 - protein, 533 aa, Homo sapiens
MPFTGRGKKESFQLLQHIRIANRPERLPSQLRGSRGKGKPRSRSWGGAHSAPPGTGNKMAGPMGRQRPSHSAYRGRPGCCLSNVTVLLSALTIMATLTTSVLLFTQTVVSKATLSWKFLWSVFLEIRHHLLTTTTWARAQVHLVDVPVRGQDSVAGTYPSSFRERTLHMVLSGHLWPTGTGKWSQSCEALRSHGGPAATTKYILSCCWPTCGQLGSTTSNVQNPGTRVSYPVYTLGDPGMHCCVGLYEQEITYGDKKGRAGRKRFNPGTIPTCCTAQWRSSGANRDDLNDSTDCWRPAEMPDQEIARWKQRLEQAKAEMKQATDVGVRQLTSLAHNPQSNLHLLEGGRDHKYLQLVAAAEPAATASEQKMAVPLTYANLGKSARDVFTKGYGFGLIKLDLKTKSENGLEFTSSDSANTVATKKWNTDNTLGTQITVEDQLARVLKLTFDSSFSPNTGGKKAKIKTGYKWEHINLGCDMDFDIAGPSIQCALVLGYGGWLANYQMNFETAKSRVTQSNFAVGYKTDEFQLHTNV

SEQ ID NO: 2633 - protein, 381 aa, Homo sapiens
MLVWGQRLPREGVSNGEHVSESTASMKKHHNEEHVSESMASMGKHCNEEHVSESTASMRRHHNEEHVSESTASMRKHHNEEHVLESMASMRKHHNEEHVSESTASMGKHRNEEHVSESTASMRRYHNEEHVSESTASMRKHHNEEHVSESTASMGKHHNEEHVSESTASMGKHHNEEHVSESTASMGKHRNEEHVSESMASMGKHHNEEHVSESMASMGKHHNEEHVSESTASMGKHHNEEHVLESMASMGKHHNEEHVLESMASMGKHHNEDHVLESMASMGKHHNEEHVSESTASMGKHHNEEHVSESTASMGKHHNEEHVLESMASVGKHHNEEHVLESMASMGKHHNEEHVSESTASMGKHHNEEHASHAIMAPFLL

SEQ ID NO: 2634 - protein, 165 aa, Homo sapiens
MSLLLKKKTTATGEWTWLERKTKGREPEPVGVLMERSWGAEKKSRKNLAENNPLRNSKPHRKASPLLKVSLHYLGLQEEQGSTTSLHRNTEQQHPSNKEQTSHRVVHRGLDEEALPGAHFGGGHRRGVLCSLHYCSPITNLLTLNLRYHWGHVRNSESLQCYQQV

SEQ ID NO: 2635 - protein, 180 aa, Homo sapiens
MFAGREASEDAEGGLRLTSASVSGTFPSPTSHRRRSPGKTALADPPGVWASSHIRGPLRGRAPTEGAAARLAFPPLQLEPSTKVHAAVDALAVRRARSPDPRGRPPGPLLSHRHRRCRQLPAAEEGAPDGAGRGERPPLGDLAIVRRQEKERKVLQGSGSQPSHRPSVTAYSPGASPVLD

SEQ ID NO: 2636 - protein, 698 aa, Homo sapiens
MGYNFTSRCVHQKPPCCPLWPSPPGASGAEVPKGYLACGVRLSPKPGWKTWGSPQSQATALISGTIPGQDSGPSGGARDAAERPTTPRSHLPRHSSSVKYLLGARFGWPSLSPPLISPCQGVLCHLGARGSCGGFSALQGEACALRADGPRLTLQAKKSPSSAWLPTLPTLAAGSVWRTSPAPPAAILRGMVSLGPNGLQLPMEALPRTTQPGGHCGPTPQMRKQAREEDATGPGSWEWEGPGHRECGCGFRPLGPRIPVSVGGAVVHTKGGLQREVRTLGLPPGQPSLSKSPPAAELPPVKPLFPAFCALNKLLLGLSHQHSVVGVAAARLPSCTQAPHSTHTIAPQYLQDQTQAVVVATTSIEPTPRQAMSGYLQVCADTPGTCRDLIVIAGLEVALSSAFEKPNCVILFPETLQCSSEQPPQPTGLCPSCPLYCAAITRPTLHRSFTLGATDSKYPFILMAPKPNQVIETIQNLTHQEGFQADASWSPDRQQDNNIAAEQGPGSFVEPPLCTLGPGFFGDAAVRAVAKQNQQTQSQGPNSKDAAGDPGSSGPFPSEPQSQQPCSLWAQLGAAPKCGEQALPRQSPAHASEPGVPQAHCPPGLGRPRSQPQTCQQEEQRVEAVGRLAVGGPRFMAVQDTAGSRNLAARTDLAQYNGEADGRTPAGVRETVPLVHTIAHLHGFLESTAAVLNNRHPE

SEQ ID NO: 2637 - protein, 896 aa, Homo sapiens
MESLKTDTEMPYPEVIVDVGRVIFGEENRKKMTNSCLKRSENSRIIRAICALLNSGGGVIKAEIDDKTYSYQCHGLGQDLETSFQKLLPSGSQKYLDYMQQGHNLLIFVKSWSPDVFSLPLRICSLRSNLYRRDVTSAINLSASSALELLREKGFRAQRGRPRVKKLHPQQVLNRCIQEEEDMRILASEFFKKDKLMYKEKLNFTESTHVEFKRFTTKKVIPRIKEMLPHYVSAFANTQGGYVLIGVDDKSKEVVGCKWEKVNPDLLKKEIENCIEKLPTFHFCCEKPKVNFTTKILNVYQKDVLDGYVCVIQVEPFCCVVFAEAPDSWIMKDNSVTRLTAEQWVVMMLDTQSASSARKSPGYPIKVHKFKEALQRHLFPVTQEEVQFKPESLCKKLFSDHKELEGLMKTLIHPCSQGIVIFSRSWAGDVGFRKEQNVLCDALLIAVNSPVVLYTILIDPNWPGGLEYARNTAHQLKQKLQTVGGYTGKVCIIPRLIHLSSTQSRPGEIPLRYPRSYRLADEEEMEDLLQALVVVSLSSRSLLSDQMGCEFFNLLIMEQSQLLSESLQKTRELFIYCFPGVRKTALAIKIMEKIKDLFHCKPKEILYVCESDSLKDFVTQQTTCQAVTRKTFMQGEFLKIKHIVMDETENFCSKYGNWYMKAKNITHPKAKGTGSENLHHGILWLFLDPFQIHHADVNGLPPPSAQFPRKTITSGIHCALEIAKVMKEEMKRIKENPPSNMSPDTLALFSETAYEEATCAQALPGVCETKTNLTTEQIANYVARKCHSLFQCGYLPKDIAILCRRGEDRGRYRLALLKAMELIETHRPSEVVFSPATGVWGSHIVLDSIQQFSGLERTVVFGLSPECDQSEEFHKLCFASRAIKHLYLLYEKRAAY

SEQ ID NO: 2638 - protein, 357 aa, Homo sapiens
METRLPPRNIQDVESDSAKQFLQAAEAIDDIPFGITSNSDVFSKYQLDKDGVVLFKKFDEGRNNFEGEVTKENLLDFIKHNQLPLVIEFTEQTAPKIFGGEIKTHILLFLPKSVSDYDGKLSNFKTAAESFKGKILFIFIDSDHTDNQRILEFFGLKKEECPAVRLITLEEEMTKYKPESEELTAERITEFCHRFLEGKIKPHLMSQELPEDWDKQPVKVLVGKNFEDVAFDEKKNVFVEFYAPWCGHCKQLAPIWDKLGETYKDHENIVIAKMDSTANEVEAVKVHSFPTLKFFPASADRTVIDYNGERTLDGFKKFLESGGQDGAGDDDDLEDLEEAEEPDMEEDDDQKAVKDEL

SEQ ID NO: 2639 - protein, 930 aa, Homo sapiens
MYEGALRPPWFSRQLPLSGGNDLWTNLHKWWFSKSRSHAGQHVTKLNQDFQGPRRDVPGVGNSNGSGQHLLLTPCAPEFVTIVAFSRERQRSPRETTHSGPAALLPKTVPTAVGSLLPVTMETQEGLYLPIMTQSHTKCLHVPGQALIFTPYSPPMGTTQKIPLKGRFSTVYFLCGNFSGCSGLTSVWNFRHHSQQHLDYKASSQTVTDPILPIRKLRLKDAGPESFTVSNTLMLNQWRLISADCHAWTLGSAPDTAPPSARGPPIQPSMQPTPAISQASLTWKATLTFSAGPDSEVGALNASICNFSLRLGDKKEPVKMRRASKYVKWPIVAASVCCCNRTSWMDEMIWLITTDLPGLLTKFLFNWFLQHDLVPETSDSWKAECGRSEAFPKTLSREFQKDSEKTHGLCSQQQIQGLFCGVCSLFPPTHLWILLPAIDFPSVFTSFEAQHVHETGLYLEIPKTISKRFLCSKEEKVVLGWENVDFPRKTKAYPVICQKIEHKQLLGPTGGPRGPLLWWSILPVVPVPRQVVGVKQVMSAVMYRSPDLFNNKPAFYPSYFEGMCTRVRSGRNPEQGSNQWHRTGEQGSEQGSNQWHRTGDQGLALNEEHQRRAAKGCVGSTARKMWYEVDKGLSLRLDMIRNVILSYGQGGKNICDGKEKLASTARELSIQNGPPLHDKAQNFQQKFQTHSTLCTPHRQARETMKTHKMISHKNYKSLIGNPHPLKQLLSGRPPVRHLKGSPDAPSGGFAAGYCRKQSLFFKSVAQTISVFGSKEDTGERKLLGRKSNVVLILQLASSPHPLALEPIFLQEGFKANKEGSNGESRQKKLENLSKEGPSSPHKSFADGGSHKAKTVMERARKQHATLFIGAGGSALTEAAPPRRHSREKWRRKESGSDMNFDLFDKTSSTTCFREQLKSLRTPKPDLSSIC

SEQ ID NO: 2640 - protein, 155 aa, Homo sapiens
MMARRDPKSWAKRLVRAQTLQKQRRAPVGPRAPPPDEEDPRLKCKNCGAFGHTARSTRCPMKCWKAALVPATLGKKEGKENLKPWKPRGEANPGPLNKDKGEKEERPRAMQLLDKLQRCPRVSKSPRTKPDDKQGCSPQLGRQISCPHRDSKMLN

SEQ ID NO: 2641 - protein, 714 aa, Homo sapiens
MVIEHFVPSVLIFLLCTCEIFQDSVAFEDVAINFTCEEWALLGPSQKSLYRDVMQETIRNLDCIGMIWQNHDIEEDQYKDLRRNLRCHMVERACEIKDNSQCGGPFTQTQDSIVNEKIPGVDPWESSECTDVLMGRSSLNCYVRVDSEHKPCEYQEYGEKPYTHTQCGTAFSYQPCFQIHERPQHGKKLYDCKECASFSSLENLQRHMAAHHGDGPRICKLCGNAFIWPSLFHMLRRTHTEEKPYEYEQCSTAFPAYSSTLRHERTHSGEKPYQCKQCGKAFSCSCYTQLYERTHTGEQSYECKQCGKAFYHLGSFQRHMIVHTGDGPHKCKICGKGFLSPSSVRRHKRTHTGEKPYECKYCGKAFSDCTGFRRHMITHTGDGPHKCKVCGKAFDSPSLCRRHETTHTGEKPYKCECGKAFSDFYYFRNHETTHTGEKPYKCKQCGKAFICCTYLQIHERIHTGERPYKCKQCGKAFRSSNYIRVHEKTHTGEKPYECKQCGKALSHLKSFQRHMIMHTGDGPHKCKICGKSFDSPSSFRRHERIHTGERPYKCKLCGKGFRSSSYIQLHERTHTGEKPYGCQQCGKALSDLSSFRRHMITHTGNGPHKCKICGKGFDYPSSVQRHERTHTGEKPYECKECGKAFSHSSYLRIHERVHTGEKPYKCKECGKPFHCPSAFHKHERTHSMEKPYKCKECGEAFHCISSFHKHEMTH

SEQ ID NO: 2642 - protein, 116 aa, Homo sapiens
MACTAQRTQWALTKRSLRATRESVSRQQGVYGLVGRKRTRHHRGVLGLLGIPSARPERPGTGSEAGPTRLPGAAVARRRPARLPAQDGNINNNIKLGSFIPLLLSTLHAGHSPRRK

SEQ ID NO: 2643 - protein, 458 aa, Homo sapiens
MAMATTQSSMDAGVSRGPIPTIQSSMNTGVSPGPVPTIQSSMNTAVSPGPVPTTQSSMDTGVSLGPVPNTQSSMDTGVSPGPVPTTQSSMDTGVSPGPVPTTQSSMDTGVSAGPIPTTQSFCGDHDVTRAHPHHTELHGHRVEPADPDPWKPEPSGFAVCEDERPSQAAFRFRDPARVGQTGLQGLVLEEPGEQEESEAGGAPQPRGNRASVNSTSPALSQGMWLQPPRGSPGNVESLTTGRQTLTGSFANATQITANANLAMVQTPRSNFLSVPAHSPPKVTDKIEFDTVRLCSPVNAPQIRACKKPPSRAWAKGDSRSSLPGSPNSPAAPGHLGTQPLVRRDGEATNRAADNDQEGGPRGTRKTPLLPRQRPPSQLPEGTGLVPGAVPARSTPGSCEPAGTCRKYKQLQKSKSPVMVHRQGTHRSCLALVVSPPRTLTKTTYILLRTCGDKYTGPM

SEQ ID NO: 2644 - protein, 686 aa, Homo sapiens
  VARIANT 549, 550, 551, 552, 553, 554, 555: Xaa = Any Amino Acid
MTDALLPAAPQPLEKENDGYFRKGCNPLAQTGRSKLQNQRAALNQQILKAVRMRTGAENLLKVATNSKVREQVRLELSFVNSDLQMLKEELEGLNISVGVYQNTEEAFTIPLIPLGLKETKDVDFAVVLKDFILEHYSEDGYLYEDEIADLMDLRQACRTPSRDEAGVELLMTYFIQLGFVESRFFPPTRQMGLLFTWYDSLTGVPVSQQNLLLEKASVLFNTGALYTQIGTRCDRQTQAGLESAIDAFQRAAGVLNYLKDTFTHTPSYDMSPAMLSVLVKMMLAQAQESVFEKISLPGIRNEFFMLVKVAQEAAKVGEVYQQLHAAMSQAPVKENIPYSWASLACVKAHHYAALAHYFTAILLIDHQVKPGTDLDHQEKCLSQLYDHMPEGLTPLATLKNDQQRRQLGKSHLRRAMAHHEESVREASLCKKLRSIEVLQKVLCAAQERSRLTYAQHQEEDDLLNLIDAPSVVAKTEQEVDIILPQFSKLTVTDFFQKLGPLSVFSANKRWTPPRSIRFTAEEGDLGFTLRGNAPVQVHFLDPYCSASXXXXXXXDYIVSIQLVDCKWLTLSEVMKLLKSFGEDEIEMKVVSLLDSTSSMHNKSATYSVGMQKTYSMICLAIDDDDKTDKTKKISKKLSFLSWGTNKNRQKSASTLCLPSVGAARPQVKKKLPSPFSLLNSDSSWY

SEQ ID NO: 2645 - protein, 161 aa, Homo sapiens
MAEPTGLLEMSELPGDSSVPQVGTASGVSDVLRGAVGGGVRVQEAREGPVAEAARSMARMPGPVPGPIPSSVPGLASAPDPHQQLAFLEINRQLLFREYLDGSSMIPVRLLRDFEERRRLFVEGCKAREAAFDADPPQMDFAAVAFTVALTASEALSPLAD

SEQ ID NO: 2646 - protein, 218 aa, Homo sapiens; identical to SEQ ID NO: 1854

SEQ ID NO: 2647 - protein, 658 aa, Homo sapiens
MWTPVRRGAAWLGTLLGPGEGPPEPRGGAAHAHKPPAGSRKSTDQAVRFGPSQGMCSEARLARRAVEELLRCGADPNLVLEDGAAAVHLAAGARHPRGLRCLGALLRQGGDPNARSVEALTPLHVAAAWGCRRGLELLLSQGADPALRDQDGLRPLDLALQQGHLECARVLQDLDTRTRTRTRIGAETQEPEPAPGTPGLSGPTDETLDSIALQKQPCRGDNRDIGLEADPGPPSLPVPLETVDKHGSSASPPGHWDYSSDASFVTAVEVSGAEDPASDTPPWAGSLPPTRQGLLHVVHANQRVPRSQGTEAELNARLQALTLTPPNAAGFQSSPSSMPLLDRSPAHSPPRTPTPGASDCHCLWEHQTSIDSDMATLWLTEDEASSTGGREPVGPCRHLPVSTVSDLELLKGLRALGENPHPITPFTRQLYHQQLEEAQIAPGPEFSGHSLELAAALRTGCIPDVQADEDALAQQFEQPDPARRWREGVVKSSFTYLLLDPRETQDLPARAFSLTPAERLQTFIRAIFYVGKGTRARPYVHLWEALGHHGRSRKQPHQACPKVRQILDIWASGCGVVSLHCFQHVVAVEAYTREACIVEALGIQTLTNQKQGHCYGVVAGWPPARRRRLGVHLLHRALLVFLAEGERQLHPQDIQARG

SEQ ID NO: 2648 - protein, 430 aa, Homo sapiens
MGDLDVPLEQEMAKEDPVCAPESMGSEDMLFMLYTSGSTGMPKGIVHTQAGYLLYAALTHKLVFDHQPGDIFGCVADIGWITGHSYVVYGPLCNGATSVLFESTPVYPNAGRYWETVERLKINQFYGAPTAVRLLLKYGDAWVKKYDRSSLRTLGSVGEPINCEAWEWLHRVVGDSRCTLVDTWWQTETGGICIAPRPSEEGAEILPAMAMRPFFGIVPVLMDEKGSVVEGSNVSGALCISQAWPGMARTIYGDHQRFVDAYFKAYPGYYFTGDGAYRTEGGYYQITGRMDDVINISGHRLGTAEIEDAIADHPAVPESAVIGYPHDIKGEAAFAFIVVKDSAGDSDVVVQELKSMVATKIAKYAVPDEILVVKRLPKTRSGKVMRRLLRKIITSEAQELGDTTTLEDPSIIAEILSVYQKCKDKQAAAK

SEQ ID NO: 2649 - protein, 361 aa, Homo sapiens
MGHEGDGGMGRGMDPDPDKTANGNGTENETAQSWTDLLIKATRLHSPAATALPSLGAQPLWGEGGLRMPGEGSDPAFSPLAQSLVGRVEGECGGWQLSGGAWGLQRGDGAEMISELFGEDRSSTSPCGTSLIFLPALSPPWAGSPAANTGGSSLTMGSWWDPASLRPRQGFCLEEGSSTGQSIRGSEWTRHTAQKVLPALRGDFLESEWREPQKQELGQEQWGDLCCRPIAHVREMPVENLKMSAPGSHLRPMPSPEVQWATETLGELAVRAASAKGFRSAYCCGLQPAALPSWVRRQLMPTGALGCQRWGGSLDPVRELLAKGLVSHEANGDQAGWVPGAPEGRRKGAGICGGPLLTKTA

SEQ ID NO: 2650 - protein, 1117 aa, Homo sapiens
MKKASRSVGSVPKVSAISKTQTAEKIKPENSSSASTGGKLVKPGTAASLSKTKSSDDLLAGMAGGVTVTNGVKGKKSTCPSAAPSASAPAMTTVENKSKISTGTASSTKRSTSTGNKESSSTRERLRERTRLNQSKKLPSAGQGANDMALAKRSRSRTATECDVRMSKSKSDNQISDRAALEAKVKDLLTLAKTKDVEILHLRNELRDMRAQLGINEDHSEGDEKSEKETIMAHQPTDVESTLLQLQEQNTAIREELNQLKNENRMLKDRLNALGFSLEQRLDNSEKLFGYQSLSPEITPDNQSDGGGTLTSSVEGSAPGSVEDLLSQDENTLMDHQHSNSMDNLDSECSEVYQPLTSSDDALDAPSSSESEGIPSIERSRKGSSGNASEVSVACLTERIHQMEENQHSTSEELQATLQELADLQQITQELNSENERLGEEKVILMESLCQQSDKLEHFSRQIEYFRSLLDEHHISYVIDEDVKSGRYMELEQRYMDLAENARFEREQLLGVQQHLSNTLKMAEQDNKEAQEMIGALKERSHHMERIIESEQKGKAALAATLEEYKATVASDQIEMNRLKAQLENEKQKVAELYSIHNSGDKSDIQDLLESVRLDKEKAETLASSLQEDLAHTRNDANRLQDAIAKVEDEYRAFQEEAKKQIEDLNMTLEKLRSDLDEKETERSDMKETIFELEDEVEQHRAVKLHDNLIISDLENTVKKLQDQKHDMEREIKTLHRRLREESAEWRQFQADLQTAVVIANDIKSEAQEEIGDLKRRLHEAQEKNEKLTKELEEIKSRKQEEERGRVYNYMNAVERDLAALRQGMGLSRRSSTSSEPTPTVKTLIKSFDSASQVPNPAAAAIPRTPLSPSPMKTPPAAAVSPMQRHSISGPISTSKPLTALSDKRPNYGEIPVQEHLLRTSSASRPASLPRVPAMESAKTLSVSRRSSEEVKRDISAQEGASPASLMAMGTTSPQLSLSSSPTASVTPTTRSRIREERKDPLSALAREYGGSKRNALLKWCQKKTEGYQNIDITNFSSSWNDGLAFCALLHTYLPAHIPYQELNSQDKRRNFMLAFQAAESVGIKSTLDINEMVRTERPDWQNVMLYVTAIYKYFET

SEQ ID NO: 2651 - protein, 281 aa, Homo sapiens
MGMPSSCLVKSRLSFPLHTSACRPTSIHRPPHGPLNQLTAKATVKTTEPHMPAADQEVDPQCGRKDWTHSQRAAVRRCDPGSSPPLEPGTVLLDDTPPLPATFRQVPSPSFPPPSRPCLHFCSSFIAPGHTHKHVTEKIYPKARRRPPDHKTPSPPPGTKVSLPLPPVCIQPQEQIVVPHFKEFQANVWRAEKSISQYALQLFRQSTALPGRSLELGLTKAVGLSGHPGHNPELALTQEPPVSDVPMSKREATLSQTWTGCPQCPVAQSPDSLSKRRDPTP

SEQ ID NO: 2652 - protein, 758 aa, Homo sapiens
MEKSYPKSQSRAGTFPPDTFAAFVLWDEARDDDTLACPPGRTSAETEPQQPPPVPSCRPCSPTDESVGMFGHPSSAAVVPGAVRRRECRECGSLCSRPPRLNPQRGLEEPGELGCYQKGTGNSVPLTAQVEWLGPQGPGVGPPSSLSGCDSQPSAEFLHFPLSLGQWDQSPDRLTARVGCVWVGKAAPQSCHLSGSLRMAGIRELRVESVPSAWNSIVWAKAWIRLGWKDGRCSRNCPGPRLASSPGHTSHCSLHLHPGGPAGRQSPCEALGTTIVTVTGVHVDDHVLQASNMLSTSHFISIYRSRTPQKRVARPAERKGPCPKSPSTEELGFQPQQALAPLWAWVLTKALPSLRLRVSGAQVGVMRAKGGQTGNQEEGMSSGVRAWRQRDRGFYGLRGHRAGPAAQGPRPRYPQASPGNRSAWGGIETETQCCSPSAVGEHRVCTGGRQSNVHENTWPCRPKGWEDRGHDDINLLYGDGIHFLDGEDINLFVQCFHLSEASSHYLPPLSLTVPSAKGQPSSPLNAPLGSSPLSGSSVHRSLTQREAHSVHRKDEGQDVWAGASPVGGNDLDNEGDHSLVHETPDTRPGLCLQSQKEDALGETREVPRGNGCPQGSARLPVRAVTRAILEHAEMENSGHPSILFISVGPLVNRNLQYPAKINLWNSLPQKGLQTRDMSTPGQTLRCLDDRALNGDTPGCEGNSGPFCQGQPAIQGVRATPCRKPTQHSPPAGVRSAWPAAGSGQDAPSGNTGRKGGRC

SEQ ID NO: 2653 - protein, 168 aa, Homo sapiens
MRRMNGKDGSLPPSADRWPVLKGVCVMLPCDHCPWDLAVALQVIPDGVQDSVALLWGSQLTGALTIGPEVDRAVHMVCLEDVGNTEPLRTGTLSVLSITVSQGFEQCTGHMMYVCGLDNGLSTSKSVGGERRFWPGHPQALAKGRPTKDELHGLRCRMLQSVAAEGLP

SEQ ID NO: 2654 - protein, 584 aa, Homo sapiens
MPLWALEGYKQVESSEPESVVPLLSPALPTWMHKLQSTLGCAEAPLEPSRAKVSRDFPTLPREAVPTPEGPLNDMGLGRAQSPEPEAQLETPTGRKEPGLPSSSPCGLVPWRAGPAGVNQFKCELDGCSSRFANSCDWEMSTHAHMGDQLQASGKPVATRTQAEEQKETPAPGLTPEQPLPRLYTINICFQPDRSRFLTQLVPGVLQAYVPLEHDSGTVREPAAAQPGNAHSLRESYRTHLAACESLARGTEAVQKMPYVPELPAMIIGISRALGSTSSLGLQRARSSVNKGQSSLIQWLIFTRNIRRLPQGDVGQQEDSVLPFISFPMCSPVGKVKSLSYWTLLESFVHLPMRALKEGLIPTTFSLPSTPNGICTRCSVIAHNPPALGFASSDRQMITNGLKPNQLHLKRLQPKWLVGQSGEYGTAKLCVCFSVDPERLWFNKLYFTTQIAMVLTEKLPLSEKQLKNPTLICYKAYGWPFLEETAIFLGKKNVKTKELIASDRILGTYQKQRPAIYWTYMSDFQDELQTVQLQKTVPQGLNSKQLGLSEINLDPLTEERRYLGPKQTKPQEPLHGKLQKPLQR

SEQ ID NO: 2655 - protein, 439 aa, Homo sapiens
MRRAALRLCALGKGQLTPGRGLTQGPQNPKKQGIFHIHEVRDKLREIVGASTNWRDHVKAMEERKLLHSFLAKSQDGLPPRRMKDSYIEVLLPLGSEPELREKYLTVQNTVRFGRILEDLDSLGVLICYMHNKIHSAKMSPLSIVTALVDKIDMCKKSLSPEQDIKFSGHVSWVGKTSMEVKMQMFQLHGDEFCPVLDATFVMVARDSENKGPAFVNPLIPESPEEEELFRQGELNKGRRIAFSSTSLLKMAPSAEERTTIHEMFLSTLDPKTISFRSRVLPSNAVWMENSKLKSLEICHPQERNIFNRIFGGFLMRKAYELAWATACSFGGSRPFVVAVDDIMFQKPVEVGSLLFLSSQVCFTQNNYIQVRVHSEVASLQEKQHTTTNVFHFTFMSEKEVPLVFPKTYGESMLYLDGQRHFNSMSGPATLRKDYLVEP

SEQ ID NO: 2656 - protein, 488 aa, Homo sapiens
MVDYLQTEQKQDRHCVNTVSLLPQYYTELEILSNSTDAFFCPWFSHWIYKGIPPQVWGPVWSLLMVFKKGKARNLGKYLIWPDHNWPEQDKHAMPCQAPSYPAGGKVSPERVEGASHKSRIDSDLGSTAVSAVSLVSVMRVGPPLGPALQKMMEQGKLSSVNVHQNGLDVSHAFRNHACSKSATASNKAYGGRTLGGTGGVGPICASQHPQLPAPTPENSRGASLTSTPPSVSRRQALSQGMERISVSDPERGFRETVHVTPGGPLETPKTPGAQVHEAQPCKEQMGLVEKWTKSAFLSAKPAKIPRKVLGLERVSLAPRPLWASLSMQTLPKGDGLPSVAHQPSSRSPEADPEAKAQQHEGTSAEPRAAGHSLGAQPPRVQQVCSYLRTDPRILGDFCVGVLSQNSPCTWTSRAHGFYSAALSRHAELLFLPHLLWTSPGPMDRPIPATPAGLQQPDPAHPTENPEMTDDGYPHIATSPPTLVDNRI

SEQ ID NO: 2657 - protein, 124 aa, Homo sapiens
MVISADVVLDLGFNSVGEMRQIFICQKLCWEIACRKLPPKTDEYSHGGACLSRGNADLVWALKKAPWDSYEEQWCFWDQQAIGSDRDEEAKSSLPFTNMDNYTECKAVERLRKFSRSLGSFPNF

SEQ ID NO: 2658 - protein, 209 aa, Homo sapiens
MRLGAQTSPCGVRRGPQSLGFPGRIPVGRPSSGGKGPDPKRARAPGQALPRALCVRIAREAAAGQGPRLRDPRRPPAMGPPSQSAGLSPAHMCLLLTTAYPSASLPPPSLHPGGNGALGQEAAGTPEASSLRRGPGMPTGTPVGAGRGRRAMRAETTCARLTLHAVHSPGALGGAEVGRPLLSEWSLSAAWLGRGQTWVASYGFPFPGP

SEQ ID NO: 2659 - protein, 164 aa, Homo sapiens
MSSCPVHDCPSWDPERLEPVETGSRGALRLRGGAPGSAAGFRASIWGPAGYPSPVGLGHPASLPRPAYSPRCPEPDARHGWGSGSNAGYRGPDRAGRTPCPAQDREGRSSSPVPPPRLKAMTSQARKQNGGALIDTVDWTREAPDSDPVMSMQKTQKPQTTVGQ

SEQ ID NO: 2660 - protein, 184 aa, Homo sapiens
MKIRADIREIENKKDTIKRINTTKKLFMKKHNEHSEEIKIILHKAEEGFKEKEKSKMSIVAFVKAMDRKRSAEPQPREPEEAVRAANAKKAEPSVPAEPGTPSLAADRSGSVLQALGRSASAAQRLTCLLVSTRPPKPRRASASRVASKLSLCCCGNLPNDHVGFTPGRSRHFCLSQGEGENSL

SEQ ID NO: 2661 - protein, 58 aa, Homo sapiens
MAGPESDAQYQFTGIKKYFNSYTLTGRMNCVLVTYRSIALIVLYFKLRSKKTPAMKAT

SEQ ID NO: 2662 - protein, 390 aa, Homo sapiens
MSGDRKTDTHCVKDKPEERDLKDEKVSAGFGGRGSEPDNLTSEQQVPSTEGTKDEDNSNNVNNSISNSKMVPGDSSDSSDHILTVVPSDSSDHILTVVPSDSSDRILTVVPGDSSDRILTVVPGDSSDRILTVVPGDSSDRILTVVPGDSSDSSDHILTVVPSDLTVVPVVPGDSSDRILTVVPSDSSDRILTVVPYNSSDCILTVVSSDQVLTVVPSDRVLMDAGTSICSQPAGRKPTLSTCWFPSGKRCISKKAKYPEKILSHDAKGASGQKNQPDQGRCCLRFNKGLLAVKSSKNMQAPSRGGSHVKWAKDVSVTAPLTAKNTKSQRGAEHKASEDFTFHHLQGSLCSNLELMVPSLGGLQKEPGGKRMQRSQGQEGGMGEKEVCLP

SEQ ID NO: 2663 - protein, 264 aa, Homo sapiens
MDPAVAWGYKLASRVLKQLASGVAALGVRSRTQNLSQPSTGIPSGEPGHSAGGAAGSRCTRSMFRKVPNNASALIGSELEHGCSRQGGGCSPQPGVQPSTHLSPPESCSIGSSVLWALWSHPQREGFGVTSVGQLHKGPACLCVYPGNCRMAHAEQKLMDDLLNKTRYNNLICPATSSSQLISIETELSLAQCISVLAQQVTLQAPYLLGEIRTKLRELTGTVAQEEAQLKDAKGSRVVYAPPPLSTVRSERRGLSARLAQTGV

SEQ ID NO: 2664 - protein, 101 aa, Homo sapiens
MRAARLPGPSHLLPEGRRGPPAGTPGAGVSSASARRRTWAHQTQTAAETSQEASSHPAGKLPAQSCVEESMGSDLTPTSTAVSTPLHQREDGASVLGTLGS

SEQ ID NO: 2665 - protein, 1596 aa, Homo sapiens
MLRPGNVAGRQLREVPNAKGHTAAAIVPQYPTPGSAGAEVPGLEGAEVPGLEGAEVPGLEGAEVPGLEGAEVPGVEGAEVPGLEGAEVPGVEGAEVPGLEGAEVPGVEGAEVPGLEGAEVPGVEDAEVPGLEGAEVPGVEGAEVPGLEGAEVPGVEGAEVPGVEGAEVPGLEGAEVPGLEGAEVPGVEGAEVPGVEDAEVPGVEGAEVPGLEGAEVPGLEGAEVPGVEGAEVPGVEGAEVPGLEGAEVPGVEDAEVPGLEGAEVPGLEGAEVPGLEGAEVPGLEDAEVPGVEGAEVPGLEDAEVPGVEGAEVPGLEGAEVPGVEGAEVPGVEGAEVPGVEGAEVPGLEDAEVPGVEGAEVPGLEGAEVPGVEGAEVPGVEGAEVPGLEGAEVPGVEGAEVPGVEDAEVHGLEGAEVPGLEGAEVPGVEGAEVPGVEGAEVPDVEGAEVPGVEGAEVPGLEGAEVPGLEGAEVPGVEGAEIRGLEGAEVPGVEGAEVPGLEGAEVPGLEGAEVPGVEGAEVPGLEDAEVPGVEGAEVPGLEGAEVPGVEGAEVPGLEDAEVPGVEGAEVPGVEGAEVPGVEGAEVPGVEGAEVPGLEGAEVPGLEGAKVPRLEGAEVPDVEGAEVPGLEGAEVPGVEGAEVRGLEGAEVPGLEGAEVPDVEGAEVPGLEGAEVPGVEGAEVPGLEDAEVPGVEGAEVPGLDGAEVPGLEGAKVPGLEGAEVPDVEGAEIRGLEGAEVPGLEDAEVPGVEGAEVPGVEGAEVPGVEGAEVPGVEGAEVPGVEGAEVPGVKGAEVPDVEGAEVPASALVVMAVSSDFGFRVRLDPPRGPVTVEGRSATTSGYPTKVTKIGGPLDPAGGLEGPLHGALGSDPLEVSDCPGPHLSRKVWENGSFGASDQQHTRIPQTAAAGPQWQKRKLPRQNSITAAWRPRDKRGTVTTREIVPHAARYRPMRTTREIVPHTRPEQPEKSSHTQPRTFQREQPEKSSHTWPGTIRREQPEKSYPTRPGTIRREQPEKSYPTRPGTFRQEQPEKSFHTCNQVPSDNNNHRNHPPRGQVPSNENDQVPSDKNNQVPSDENDPRNCPTCSHVPSNENNPRNHPTHGHIPSNENNQYLPMRTTSQVPSNEDNQVSSDKNNQAPSNENNQKVQWGSGCRAGNALHSFSVACMGLEPLKTKAQCTWMLVNPKVPYGATSGPTSSDDGRSHGHANFDSLRTTRANDSFQTSPGLAVIAALIVVGPLLEASWRKLPSALTVGNRDPLQTRDTHGLQETGTHYRHGTHTGYRKPGPITDTGHTRFTGNRDPLQTRDTHGLDPASRRCQRDARLDSASRRCQPDAEQRTLVKEQLGGVCSAEAQSRRGRLCTRTWRLRGHETPRVRDKGSEWPSRAEGTEAARGRSLRTERHGHDWKAQTRVTSPQPRSEAAGWRAAPCTELRPRVEGDGHWRHGVYCALDLVVATLMFTRGHVGARCPLCVLLCAQETGAPAGVGGGACRPRSPTDPGPTERSTWRPLLSQPPHHPLSLLRQRYPRPRVRSRSPGGRCPRQPPAPYAELQQGPPEAPTVGGPCIHATNNYGAPAFRGPWSQVLGTRLLAGRTRSRPLLS

SEQ ID NO: 2666 - protein, 165 aa, Homo sapiens
MVKVGTNGFGRIGRLVSRAAFNSESTSIFTTMEKAGTHLQRGAKRNIIPASTGAAKAAGKVIPELNGKLTCMAFSVPAANVSVVDLTCRLEKPVEYDDIKKGIWGYTEHQVVSSDFNRDTHSSTFDAGAGIALNDHFVKLVSWYENEFGYSNRVADLMAHMASKE

SEQ ID NO: 2667 - protein, 315 aa, Homo sapiens
MSAERAQSTAEHCMFMAWTSLLNRENIYLPVDCLPYTKQGNGNITETKENDPPVQWVQTGDFSWIHPSGGFCLATTLFGKNLDLIILGQLVIVSAFHISMYPQIPISSAEKAFGFDSHPLSSPQQEENVREPLRPCFLTRRKVADTAMITPNLEAQTRVAPNPWGQGQKVDVATQTAGEGGGKVTFKTGGPEHRSDPNTDLTPSTDLTPSTDLTPSTDLTPNTDLIPNTDLTPNTDLTPSTDLTPNTDLIPNTDLTPNTDLTPSTDLTPSADLTPSTDLTPSTDLTPRCGPNPQHRPDPQHGPDPQHRPDPRART

SEQ ID NO: 2668 - protein, 522 aa, Homo sapiens
MLSVCVSAAVARDLTRKEGGIVKRTGTIVDVPVGEELLGRVVDALGNAIDGKGPMGSKTHKIIPRTSVWEPMPTGIKAVDSLVPIGRGQHELIIGDRRTGKTSIAIDTIINQKHFNDRSEEKKKLYCIYVAIGRKRSTVAQLVKRLTDADAVKYTTVVSAMASDAALLQYLAPYSDCSMGEYFRDDGKYTLIIYDDLSKQAVAYCQMSLLLHRPPWSTMKQAAGTMKLELAQDREVAAFAQFGSDLNAPTQQLLSRGVRLTELLKQGQYPPMVTEQQVAVICAGGENIEDIPKEVLTDCAHLVKANSTQGCKNNVNVVNTPRSNLKKTADVDVRQIGFHRQKDVKIVTMEKKRGFLAHIWNKEVQDLIRDYLEEGKKWWIGQNVMPLKKHQDNKYPADVAANGPPKPLSCTYLSRNFIRISSKGDKCLLKYYFICQTGDFLDGDAHYERNGNNSHLYQRHKKTKRGVAIARDKMPPDFQDHVIPGQEIKAKSFYSPVDSDETGDKIRYNSKRRHWRTGMLGL

SEQ ID NO: 2669 - protein, 129 aa, Homo sapiens
MALKAFRKCMCGPSSHEHVLSQEMPIVLKCLGSPAGPPLGFPPHIVFVLSKSWLVALPEHFVLGTSLGPGHKEKSNTAPSQFFEKQQQREHNCHNSPAPQQNICKARCHMSCSLMLPVTGIQQDLWAPL

SEQ ID NO: 2670 - protein, 192 aa, Homo sapiens
MTSASTKVGEIFSAAGAAFTKLGELTMQLHPVADSSPAGAKWTETEIEMLRAAVKRFGDDLNHISCVIKERTVAQIKATVKRKVYEDSGIPLPAESPKKGPKKVASGVLSPPPAAPPPSSSSVPEAGGPPIKKQKADVTLSALNDSDANSDVVDIEGLGETPPAKKLNFDQDSLTLDSGLLMTSADPPLLSC

SEQ ID NO: 2671 - protein, 112 aa, Homo sapiens
RLGQRPCREPVLPAGAACRRGPRPHVNQARRRSPALETPRRKAVLLAPSSARPHFPGPRGTQLGLPPPERPSTLVLYRVRLREVPGAPGPCLAPYDLWARGQLLPMPAVPAP

SEQ ID NO: 2672 - protein, 704 aa, Homo sapiens
MARELRALLLWGRRLRPLLRAPALAAVPGGKPILCPRRTTAQLGPRRNPAWSLQAGRLFSTQTAEDKEEPLHSIISSTESVQGSTSKHEFQAETKKLLDIVARSLYSEKEVFIRELISNASDALEKLRHKLVSDGQALPEMEIHLQTNAEKGTITIQDTGIGMTQEELVSNLGTIARSGSKAFLDALQNQAEASSKIIGQFGVGFYSAFMVADRVEVYSRSAAPGSLGYQWLSDGSGVFEIAEASGVRTGTKIIIHLKSDCKEFSSEARVRDVVTKYSNFVSFPLYLNGRRMNTLQAIWMMDPKDVREWQHEEFYRYVAQAHDKPRYTLHYKTDAPLNIRSIFYVPDMKPSMFDVSRELGSSVALYSRKVLIQTKATDILPKWLRFIRGVVDSEDIPLNLSRELLQESALIRKLRDVLQQRLIKFFIDQSKKDAEKYAKFFEDYGLFMREGIVTATEQEVKEDIAKLLRYESSALPSGQLTSLSEYASRMRAGTRNIYYLCAPNRHLAEHSPYYEAMKKKDTEVLFCFEQFDELTLLHLREFDKKKLISVETDIVVDHYKEEKFEDRSPAAECLSEKETEELMAWMRNVLGSRVTNVKVTLRLDTHPAMVTVLEMGAARHFLRMQQLAKTQEERAQLLQPTLEINPRHALIKKLNQLRASEPGLAQLLVDQIYENAMIAAGLVDDPRAMVGRLNELLVKALERH

SEQ ID NO: 2673 - protein, 559 aa, Homo sapiens
MPLVKRNIDPRHLCHTALPRGIKNELECVTNISLANIIRQLSSLSKYAEDIFGELFNEAHSFSFRVNSLQERVDRLSVSVTQLDPKEEELSLQDITMRKAFRSSTIQDQQLFDRKTLPIPLQETYDVCEQPPPLNILTPYRDDGKEGLKFYTNPSYFFDLWKEKMLQDTEDKRKEKRKQKQKNLDRPHEPEKVPRAPHDRRREWQKLAQGPELAEDDANLLHKHIEVANGPASHFETRPQTYVDHMDGSYSLSALPFSQMSELLTRAEERVLVRPHEPPPPPPMHGAGDAKPIPTCISSATGLIENRPQSPATGRTPVFVSPTPPPPPPPLPSALSTSSLRASMTSTPPPPVPPPPPPPATALQAPAVPPPPAPPQIAPGVLHPAPPPIAPPLVQPSPPVARAAPVCETVPVHPLPQGEVQGLPPPPPPPPLPPPGIRPSSPVTVTALAHPPSGLHPTPSTAPGPHVPLMPPSPPSQVIPASEPKRHPSTLPVISDARSVLLEAIRKGIQLRKVEEQREQEAKHERIENDVATILSRRIAVEYSDSEDDSEFDEVDWLE

SEQ ID NO: 2674 - protein, 128 aa, Homo sapiens
HEAGFGRRPRRPVDGRVGRGTGPTAAVSRFCPRRVRAMAASPGSGSANPRKFSEKIALHTQRQAEETRAFEQLMTDLTLSRVQFQKLQQLRLTQYHGGSLPNVSQLRSSASEFQVERNSSPCVDGLRQ

SEQ ID NO: 2675 - protein, 1036 aa, Homo sapiens
MALRGAAGATDTPVSSAGGAPGGSASSSSTSSGGSASAGAGLWAALYDYEARGEDELSLRRGQLVEVLSQDAAVSGDEGWWAGQVQRRLGIFPANYVAPCRPAASPAPPPSRPSSPVHVAFERLELKELIGAGGFGQVYRATWQGQEVAVKAARQDPEQDAAAAAESVRREARLFAMLRHPNIIELRGVCLQQPHLCLVLEFARGGALNRALAAANAAPDPRAPGPRRARRIPPHVLVNWAVQIARGMLYLHEEAFVPILHRDLKSSNILLLEEIEHDDICNKTLKITDFGLAREWHRTTKMSTAGTYAWMAPEVIKSSLFSKGSDIWSCGVLLWELLTGEVPYRGIDGLAVAYGVAVNKLTLPIPSTCPEPFAKLMKECWQQDPHIRPSFALILEQLTAIEGAVMTEMPQESFHSMQDDWKLEIQQMFDELRTKEKELRSREEELTRAALQQKSQEELLKRREQQLAEREIDVLERELNILIFQLNQEKPKVKKRKGKFKRSRLKLKDGHRISLPSDFQHKITVQASPNLDKRRSLNSSSSSPPSSPTMMPRLRAIQLTSDESNKTWGRNTVFRQEEFEDVKRNFKKKGCTWGPNSIQMKDRTDCKERIRPLSDGNSPWSTILIKNQKTMPLASLFVDQPGSCEEPKLSPDGLEHRKPKQIKLPSQAYIDLPLGKDAQRENPAEAGSWEEAASANAATVTIEMAPTNSLSRSPQRKKTESALYGCTVLLASVALGLDLRELHKAQAAEEPLPKEEKKKREGIFQRASKSRRSASPPTSLSSTCGEASSPPSLPLSSALGILSTPSFSTKCLLQMDSEDPLVDSAPVTCDSEMLTPDFCPTAPGSGREPALMPRLDTDCSVSRNLPSSFLQRTCGNVPYCASSKHRPSHHRRTMSDGNPTPTGATIISATGASALPLCPSPAPHSHLPREVSPKKHSTVHIVPQRRPASLRSRSDLPQAYPQTAVSQLAQTACVVGRPGPHPTQFLAAKERTKSHVPSLLDVDVEGQSRDYTVPLGRMRSKTSRPSIYELEKEFLS

SEQ ID NO: 2676 - protein, 314 aa, Homo sapiens
TSTSRSSERTPGAATASASGAAEDGACGCLPNPGTFEECHRKCKELFPIQMEGVKLTVNKGLSNHFQVNHTVALSTIGESNYHFGVTYVGTKQLSPTEAFPVLVGDMDNSGSLNAQVIHQLGPGLRSKMAIQTQQSKFVNWQVDGEYRGSDFTAAVTLGNPDVLVGSGILVAHYLQSITPCLALGGELVYHRRPGEEGTVMSLAGKYTLNSWLATVTLGQAGMHATYYHKASDQLQVGVEFEASTRMQDASVSFGYQLDLPKANLLFKGSVDSNWIVGATLEKKLPPLPLTLALGAFLNHRKNKFQCGFGLTIG

SEQ ID NO: 2677 - protein, 267 aa, Homo sapiens [sequence omitted]

SEQ ID NO: 2678 - protein, 267 aa, Homo sapiens
MEGDCLSCMKYLMFVFNFFIFLGGACLLAIGIWVMVDPTGFREIVAANPLLLTGAYILLAMGGLLFLLGFLGCCGAVRENKCLLLFFFLFILIIFLAELSAAILAFIFRENLTREFFTKELTKHYQGNNDTDVFSATWNSVMITFGCCGVNGPEDFKFASVFRLLTLDSEEVPEACCRREPQSRDGVLLSREECLLGRSLFLNKQGCYTVILNTFETYVYLAGALAIGVLAIEEERAHSVSQATGILYQLPASPQAFQSPGTLGATA

SEQ ID NO: 2679 - protein, 540 aa, Homo sapiens
MGSHAVVNLINYQDDAELATRAIPELTKLLNDEDQVVVNKAAVMVHQLSKKEASRHAIMRSPQMVSAIVRTMQNTNDVETARCTAGTLHNLSHHREGLLAIFKSGGIPALVKMLGSPVDSVLFYAITTLHNLLLHQEGAKMAVRLAGGLQKMVALLNKTNVKFLAITTDCLQILAYGNQESKLIILASGGPQALVNIMRTYTYEKLLWTTSRVLKVLSVCSSNKPAIVEAGGMQALGLHLTDPSQRLVQNCLWTLRNLSDAATKQEGMEGLLGTLVQLLGSDDINVVTCAAGILSNLTCNNYKNKMMVCQVGGIEALVRTVLRAGDREDITEPAICALRHLTSRHQEAEMAQNAVRLHYGLPVVVKLLHPPSHWPLIKATVGLIRNLALCPANHAPLREQGAIPRLVQLLVRAHQDTQRRTSMGGTQQQFVEGVRMEEIVEGCTGALHILARDVHNRIVIRGLNTIPLFVQLLYSPIENIQRVAAGVLCELAQDKEAAEAIEAEGATAPLTELLHSRNEGVATYAAAVLFRMSEDKPQDY

SEQ ID NO: 2680 - protein, 272 aa, Homo sapiens
SSEMKTEDELRVRHLEEENRGIVVLGINRAYGKNSLSKNLIKMLSKAVDALKSDKKVRTIIIRSEVPGIFCAGADLKERAKMSSSEVGPFVSKIRAVINDIANLPVPTIAAIDGLALGGGLELALACDIRVAASSAKMGLVETKLAIIPGGGGTQRLPRAIGMSLAKELIFSARVLDGKEAKAVGLISHVLEQNQEGDAAYRKALDLAREFLPQGPVAMRVAKLAINQGMEVDLVTGLAIEEACYAQTIPTKDRLEGLLAFKEKRPPRYKGE

SEQ ID NO: 2681 - protein, 603 aa, Homo sapiens [sequence omitted]

SEQ ID NO: 2682 - protein, 459 aa, Homo sapiens [sequence omitted]

SEQ ID NO: 2683 - protein, 216 aa, Homo sapiens
AAVPRTPPPRSPNPSPERPRSALAAAILATTLTGRTVAIPQPRQRSRSESDVSSVEQDSFIEPYATTSQLRPRPNWQSEMGRRSSLPSFETLDYGDEEDIETQLSSSGKELGDVSAREDRGGHSDDLYAVPHRNQVPLLHEVNSEDDENISHQDGFPGSPPAPQWTQQKDGKHPVLNLKDEKPPLCEKPPPSPGICLLNYIMIEKLVLENIQINFI

SEQ ID NO: 2684 - protein, 226 aa, Homo sapiens
MALSDVDVKKQIKHMMAFIEQEANEKAEEIDAKAEEEFNIEKGRLVQTQRLKIMEYYEKKEKQIEQQKKILMSTMRNQARLKVLRARNDLISDLLSEAKLRLSRIVEDPEVYQGLLDKLVLQGLLRLLEPVMIVRCRPQDLLLVEAAVQKAIPEYMTISQKHVEVQIDKEAYLAVNAAGGVEVYSGNQRIKVSNTLESRLDLSAKQKMPEIRMALFGANTNRKFFI

SEQ ID NO: 2685 - protein, 236 aa, Homo sapiens
MASLDRVKVLVLGDSGVGKSSLVHLLCQNQVLGNPSWTVGCSVDVRVHDYKEGTPEEKTCYIELWDVGGSVGSASSVKSTRAVFYNSVNGIIFVHDLTNKKSSQNLRRWSLEALNRDLVPTGVLVTNGDYDQEQFADNQIPLLVIGTKLDQIHETKRHEVLTTTAFLAEDFNPEEINLDCTNPRYLAAGSSNAVKLSRFFDKVIEKRYFLREGNQIPGFPDRKRFGAGTLKSLHYD

SEQ ID NO: 2686 - protein, 773 aa, Homo sapiens
METDESPSPLPCGPAGEAVMESRARPFQALPREQSPPPPLQTSSGAEVMDVGSGGDGQSELPAEDPFNFYGASLLSKGSFSKGRLLIDPNCSGHSPRTARHAPAVRKFSPDLKLLKDVKISVSFTESCRSKDRKVLYTGAERDVRAECGLLLSPVSGDVHACPFGGSVGDGVGIGGESADKKDEENELDQEKRVEYAVLDELEDFTDNLELDEEGAGGFTAKAIVQRDRVDEEALNFPYEDDFDNDVDALLEEGLCAPKKRRTEEKYGGDSDHPSDGETSVQPMMTKIKTVLKSRGRPPTEPLPDGWIMTFHNSGVPVYLHRESRVVTWSRPYFLGTGSIRKHDPPLSSIPCLHYKKMKDNEEREQSSDLTPSGDVSPVKPLSRSAELEFPLDEPDSMGADPGPPDEKDPLGAEAAPGALGQVKAKVEVCKDESVDLEEFRSYLEKRFDFEQVTVKKFRTWAERRQFNREMKRKQAESERPILPANQKLITLSVQDAPTKKEFVINPNGKSEVCILHEYMQRVLKVRPVYNFFECENPSEPFGASVTIDGVTYGSGTASSKKLAKNKAARATLEILIPDFVKQTSEEKPKDSEELEYFNHISIEDSRVYELTSKAGLLSPYQILHECLKRNHGMGDTSIKFEVVPGKNQKSEYVMACGKHTVRGWCKNKRVGKQLASQKILQLLHPHVKNWGSLLRMYGRESSKMVKQETSDKSVIELQQYAKKNKPNLHILSKLQEEMKRLAEEREETRKKPKMSIVASAQPGGEPLCTVDV

SEQ ID NO: 2687 - protein, 5171 aa, Homo sapiens
  VARIANT 4471: Xaa = Any Amino Acid
MHSSSYSYRSSDSVFSNTTSTRTSLDSNENLLLVHCGPTLINSCISFGSESFDGHRLEMLQQIANRVQRDSVICEDKLILAGNALQSDSKRLESGVQFQNEAEIAGYILECENLLRQHVIDVQILIDGKYYQADQLVQRVAKLRDEIMALRNECSSVYSKGRILTTEQTKLMISGITQSLNSGFAQTLHPSLTSGLTQSLTPSLTSSSMTSGLSSGMTSRLTPSVTPAYTPGFPSGLVPNFSSGVEPNSLQTLKLMQIRKPLLKSSLLDQNLTEEEINMKFVQDLLNWVDEMQVQLDRTEWGSDLPSVESHLENHKNVHRAIEEFESSLKEAKISEIQMTAPLKLTYAEKLHRLESQYAKLLNTSRNQERHLDTLHNFVSRATNELIWLNEKEEEEVAYDWSERNTNIARKKDYHAELMRELDQKEENIKSVQEIAEQLLLENHPARLTIEAYRAAMQTQWSWILQLCQCVEQHIKENTAYFEFFNDAKEATDYLRNLKDAIQRKYSCDRSSSIHKLEDLVQESMEEKEELLQYKSTIANLMGKAKTIIQLKPRNSDCPLKTSIPIKAICDYRQIEITIYKDDECVLANNSHRAKWKVISPTGNEAMVPSVCFTVPPPNKEAVDLANRIEQQYQNVLTLWHESHINMKSVVSWHYLINEIDRIRASNVASIKTMLPGEHQQVLSNLQSRFEDFLEDSQESQVFSGSDITQLEKEVNVCKQYYQELLKSAEREEQEESVYNLYISEVRNIRLRLENCEDRLIRQIRTPLERDDLHESVFRITEQEKLKKELERLKDDLGTITNKCEEFFSQAAASSSVPTLRSELNVVLQNMNQVYSMSSTYIDKLKTVNLGLKNTQAAEALVKLYETKLCEEEAVIADKNNIENLISTLKQWRSEVDEKRQVFHALEDELQKAKAISDEMFKTYKERDLDFDWHKEKADQLVERWQNVHVQIDNRLRDLEGIGKSLKYYRDTYHPLDDWIQQVETTQRKIQENQPENSKTLATQLNQQKMLVSEIEMKQSKMDECQKYAEQYSATVEDYELQTMTYRAMVDSQQKSPVKRRRMQSSADLIIQEFMDLRTRYTALVTLMTQYIKFAGDSLKRLEEEEKSLEEEKKEHVEKAKELQKWVSNISKTLKDAEKAGKPPFSKQKISSEEISTKKEQLSEALQTIQLFLAKHGDKMTDEERNELEKQVKTLQESYNLLFSESLKQLQESQTSGDVKVEEKIVAERQQEYKEKLQGICDLLTQTENRLIGHQEAFMIGDGTVELKKYQSKQEELQKDMQGSAQALAEVVKNTENFLKENGEKLSQEDKALIEQKLNEAKIKCEQLNLKAEQSKKELDKVVTTAIKEETEKVAAVKQLEESKTKIENLLDWLSNVDKDSERAGTKHKQVIEQNGTHFQEGDGKSAIGEEDEVNGNLLETDVDGQVGTTQENLNQQYQKVKAQHEKIISQHQAVIIATQSAQVLLEKQGQYLSPEEKEKLQKNMKELKVHYETALAESEKKMKLTHSLQEELEKFDADYTEFEHWLQQSEQELENLEAGADDINGLMTKLKRQKSFSEDVISHKGDLRYITISGNRVLEAAKSCSKRDGGKVDTSATHREVQRKLDHATDRFRSLYSKCNVLGNNLKDLVDKYQHYEDASCGLLAGLQACEATASKHLSEPIAVDPKNLQRQLEETKALQGQISSQQVAVEKLKKTAEVLLDARGSLLPAKNDIQKTLDDIVGRYEDLSKSVNERNEKLQITLTRSLSVQDGLDEMLDWMGNVESSLKEQGQVPLNSTALQDIISKNIMLEQDIAGRQSSINAMNEKVKKFMETTDPSTASSLQAKMKDLSARFSEASHKHKETLAKMEELKTKVELFENLSEKLQTFLETKTQALTEVDVPGKDVTELSQYMQESTSEFLEHKKHLEVLHSLLKEISSHGLPSDKALVLEKTNNLSKKFKEMEDTIKEKKEAVTSCQEQLDAFQVLVKSLKSWIKETTKKVPIVQPSFGAEDLGKSLEDTKKLQEKWSLKTPEIQKVNNSGISLCNLISAVTTPAKAIAAVKSGGAVLNGEGTATNTEEFWANKGLTSIKKDMTDISHGYEDLGLLLKDKIAELNTKLSKLQKAQEESSAMMQWLQKMNKTATKWQQTPAPTDTEAVKTQVEQNKSFEAELKQNVNKVQELKDKLTELLEENPDTPEAPRWKQMLTEIDSKWQELNQLTIDRQQKLEESSNNLTQFQTVEAQLKQWLVEKELMVSVLGPLSIDPNMLNTQRQQVQILLQEFATRKPQYEQLTAAGQGILSRPGEDPSLRGIVKEQLAAVTQKWDSLTGQLSDRCDWIDQAIVKSTQYQSLLRSLSDKLSDLDNKLSSSLAVSTHPDAMNQQLETAQKMKQEIQQEKKQIKVAQALCEDLSALVKEEYLKAELSRQLEGILKSFKDVEQKAENHVQHLQSACASSHQFQQMSRDFQAWLDTKKEEQNKSHPISAKLDVLESLIKDHKDFSKTLTAQSHMYEKTIAEGENLLLKTQGSEKAALQLQLNTIKTNWDTFNKQVKERENKLKESLEKALKYKEQVETLWPWIDKCQNNLEEIKFCLDPAEGENSIAKLKSLQKEMDQHFGMVELLNNTANSLLSVCEIDKGVVTDENKSLIQKVDMVTEQLHSKKFCLENMTQKFKEFQEVSKESKRQLQCAKEQLDIHDSLGSQAYSNKYLTMLQTQQKSLQALKHQVDLAKRLAQDLVVEASDSKGTSDVLLQVETIAQEHSTLSQQVDEKCSFLETKLQGIGHFRNTIREMFSQFAEFDDELDSMAPVGRDAETLQKQKETIKAFLKKLEALMASNDNANKTCKMMLATEETSPDLVGIKRDLEALSKQCNKLLDRAQAREEQVEGTIKRLEEFYSKLKEFSILLQRAEEHEESQGPVGMETETINQQLNMFKVFQKEEIEPLQGKQQDVNWLGQGLIQSAAKSTSTQGLEHDLDDVNARWKTLNKKVAQRAAQLQEALLHCGRFQDALESLLSWMVDTEELVANQKPPSAEFKVVKAQIQEQKLLQRLLDDRKSTVEVIKREGEKIATTAEPADKVKILKQLSLLDSRWEALLNKAETRNRQLEGISVVAQQFHETLEPLNEWLTTIEKRLVNCEPIGTQASKLEEQIAQHKALEDDIINHNKHLHQAVSIGQSLKVLSSREDKDMVQSKLDFSQVWYIEIQEKSHSRSELLQQALCNAKIFGEDEVELMNWLNEVHDKLSKLSVQDYSTEGLWKQQSELRVLQEDILLRKQNVDQALLNGLELLKQTTGDEVLIIQDKLEAIKARYKDITKLSTDVAKTLEQALQLARRLHSTHEELCTWLDKVEVELLSYETQVLKGEEASQAQMRPKELKKEAKNNKALLDSLNEVSSALLELVPWRAREGLEKMVAEDNERYRLVSDTITQKVEEVDAAILRSQQFDQAADAELSWITETEKKLMSLGDIRLEQDQTSAQLQVQKTFTMEILRHRDIIDDLVKSGHKIMTACSEEEKQSMKKKLDKVLKNYDTICQINSERYLQLERAQSLVNQFWETYEELWPWLTETQSIISQLPAPALEYETLRQQQEEHRQLRESIAEHKPHIDKMNKTGPQLLELSPGEGFSIQEKYVAADTLYSQIKEDVKKRAVALDEAISQSTQFHDKIDQILESLERIVERLRQPPSISAEVEKIKEQISENKNVSVDMEKLQPLYETLKQRGEEMIARSGGTDKDISAKAVQDKLDQMVFIWENIHTLVEEREAKLLDVMELAEKFWCDHMSLIVTIKDTQDFIRDLEGPGIDPSVVKQQQEAAETIREEIDGLQEELDIVINLGSELIAACGEPDKPIVKKSIDELNSAWDSLNKAWKDRIDKLEEAMQAAVQYQDGLQAVFDWVDIAGGKLASMSPIGTDLETVKQQIEELKQFKSEAYQQQIEMERLNHQAELLLKKVTEESDKHTVQDPLMELKLIWDSLEERIINRQHKLEGALLALGQFQHALDELLAWLTHTEGLLSEQKPVGGDPKAIEIELAKHHVLQNDVLAHQSTVEAVNKGGNDLIESSAGEEASNLQNKLEVLNQRWQNVLEKTEQRKQQLDGALRQAKGFHGEIEDLQQWLTDTERHLLASKPLGGLPETAKEQLNVHMEVCAAFEAKEETYKSLMQKGQQMLARCPKSAETNIDQDINNLKEKWESVETKLNERKTKLEEALNLAMEFHNSLQDFINWLTQAEQTLNVASRPSLILDTVLFQIDEHKVFANEVNSHREQIIELDKTGTHLKYFSQKQDVVLIKNLLISVQSRWEKVVQRLVERGRSLDDARKRAKQFHEAWSKLMEWLEESEKSLDSELEIANDPDKIKTQLAQHKEFQKSLGAKHSVYDTTNRTGRSLKEKTSLADDNLKLDDMLSELRDKWDTICGKSVERQNKLEEALLFSGQFTDALQALIDWLYRVEPQLAEDQPVHGDIDLVMNLIDNHKAFQKELGKRTSSVQALKRSARELIXGSRDDSSWVKVQMQELSTRWETVCALSISKQTRLEAALRQAEEFHSVVHALLEWLAEAEQTLRFHGVLPDDEDALRTLIDQHKEFMKKLEEKRAELNKATTMGDTVLAICHPDSITTIKHWITIIRARFEEVLAWAKQHQQRLASALAGLIAKQELLEALLAWLQWAETTLTDKDKEVIPQEIEEVKALIAEHQTFMEEMTRKQPDVDKVTKTYKRRAADPSSLQSHIPVLDKGRAGRKRFPASSLYPSGSQTQIETKNPRVNLLVSKWQQVWLLALERRRKLNDALDRLEELREFANFDFDIWRKKYMRWMNHKKSRVMDFFRRIDKDQDGKITRQEFIDGILSSKFPTSRLEMSAVADIFDRDGDGYIDYYEFVAALHPNKDAYKPITDADKIEDEVTRQVAKCKCAKRFQVEQIGDNKYRFFLGNQFGDSQQLRLVRILRSTVMVRVGGGWMALDEFLVKNDPCRAKGRTNMELREKFILADGASQGMAAFRPRGRRSRPSSRGASPNRSTSVSSQAAQAASPQVPATTTPKILHPLTRNYGKPWLTNSKMSTPCKAAECSDFPVPSAEGTPIQGSKLRLPGYLSGKGFHSGEDSGLITTAAARVRTQFADSKKTPSRPGSRAGSKAGSRASSRRGSDASDFDISEIQSVCSDVETVPQTHRPTPRAGSRPSTAKPSKIPTPQRKSPASKLDKSSKR

SEQ ID NO: 2688 - protein, 797 aa, Homo sapiens; identical to SEQ ID NO: 1140

SEQ ID NO: 2689 - protein, 593 aa, Homo sapiens
MSVRLRFLSPGDTGAVGVVGRSASFAGFSSAQSRRIAKSINRNSVRSRMPAKSSKMYGTLRKGSVCADPKPQQVKKIFEALKRGLKEYLCVQQAELDHLSGRHKDTRRNSRLAFYYDLDKQTRCVERHIRKMEFHISKVDELYEDYCIQCRLRDGASSMQRAFARCPPSRAARESLQELGRSLHECAEDMWLIEGALEVHLGEFHIRMKGLVGYARLCPGDHYEVLMRLGRQRWKLKGRIESDDSQTWDEEEKAFIPTLHENLDIKVTELRGLGSLAVGAVTCDIADFFTTRPQVIVVDITELGTIKLQLEVQWNPFDTESFLVSPSPTGKFSMGSRKGSLYNWTPPSTPSFRERYYLSVLQQPTQQALLLGGPRATSILSYLSDSDLRGPSLRSQSQELPEMDSFSSEDPRDTETSTSASTSDVGFLPLTFGPHASIEEEAREDPLPPGLLPEMAHLSGGPFAEQPGWRNLGGESPSLPQGSLFHSGTASSSQNGHEEGATGDREDGPGVALEGPLQEVLELLRPTDSTQPQLRELEYQVLGFRDRLKPCRARQELTSAESLIECILESFAFLNADFAPDELSLFGGSQGLR

SEQ ID NO: 2690 - protein, 648 aa, Homo sapiens
MVSLPPPQSDVTLPGPTRLEGERQGDLMQAPGLPGSPAPQSKHAGFSCSSFVSDGPPERTPSLPPHSPRIASPGPEQVQGHCPAGPGPGPFRLSPSDKYPGFGFEEAAASSPGRFLKGSHAPFHPYKRPFHEDVFPEAETTLALKGHSFKTPGPLEAFEEIPVDVAEAEAFLPGFSAEAWCNGLPYPSQEHGPQVLGSEVKVKPPVLESGAGMFCYQPPLQHMYCSSQPPFHQYSPGGGSYPIPYLGSSHYQYQRMAPQASTDGHQPLFPKPIYSYSILIFMALKNSKTGSLPVSEIYNFMTEHFPYFKTAPDGWKNSVRHNLSLNKCFEKVENKSGSSSRKGCLWALNPAKIDKMQEELQKWKRKDPIAVRKSMAKPEELDSLIGDKREKLGSPLLGCPPPGLSGSGPIRPLAPPAGLSPPLHSLHPAPGPIPGKNPLQDLLMGHTPSCYGQTYLHLSPGLAPPGPPQPLFPQPDGHLELRAQPGTPQDSPLPAHTPPSHSAKLLAEPSPARTMHDTLLPDGDLGTDLDAINPSLTDFDFQGNLWEQLKDDSLALDPLVLVTSSPTSSSMPPPQPPPHCFPPGPCLTETGSGAGDLAAPGSGGSGALGDLHLTTLYSAFMELEPTPPTAPAGPSVYLSPSSKPVALA

SEQ ID NO: 2691 - protein, 374 aa, Homo sapiens
ARGICEYLRLPEVQGVSRILAHWACYKVQQKDVSDEDVARAINQKLGDTPGVSYSDIAARAYGCGRTELAIKLLEYEPRSGEQVPLLLKMKRSKLALSKAIESGDTDLVFTVLLHLKNELNRGDFFMTLRNQPMALSLYRQFCKHQELETLKDLYNQDDNHQELGSFHIRASYAAEERIEGRVAALQTAADAFYKAKNEFAAKATEDQMRLLRLQRRLEDELGGQFLDLSLHDTVTTLILGGHNKRAEQLARDFRIPDKRLWWLKLTALADLEDWEELEKFSKSKKSPIGYLPFVEICMKQHNKYEAKKYASRVGPEQKVKALLLVGDVAQAADVAIEHRNEAELSLVLSHCTGATDGATADKIQRARAQAQKK

SEQ ID NO: 2692 - protein, 427 aa, Homo sapiens
MRAELEYGLKKKSHGLATVRMLPTYVCGLPDGTEKGKFLALDLGGTNFRVLLVKIRSGRRSVRMYNKIFAIPLEIMQGTGEELFDHIVQCIADFLDYMGLKGASLPLGFTFSFPCRQMSIDKGTLIGWTKGFKATDCEGEDVVDMLREAIKRRNEFDLDIVAVVNDTVGTMMTCGYEDPNCEIGLIAGTGSNMCYMEDMRNIEMVEGGEGKMCINTEWGGFGDNGCIDDIRTRYDTEVDEGSLNPGKQRYEKMTSGMYLGEIVRQILIDLTKQGLLFRGQISERLRTRGIFETKFLSQIESDRLALLQVRRILQQLGLDSTCEDSIVVKEVCGAVSRRAAQLCGAGLAAIVEKRREDQGLEHLRITVGVDGTLYKLHPHFSRILQETVKELAPRCDVTFMLSEDGSGKGAALITAVAKRLQQAQKEN

SEQ ID NO: 2693 - protein, 728 aa, Homo sapiens
MAGFWVGTAPLVAAGRRGRWPPQQLMLSAALRTLKHVLYYSRQCLMVSRNLGSVGYDPNEKTFDKILVANRGEIACRVIRTCKKMGIKTVAIHSDVDASSVHVKMADEAVCVGPAPTSKSYLNMDAIMEAIKKTRAQAVHPGYGFLSENKEFARCLAAEDVVFIGPDTHAIQAMGDKIESKLLAKKAEVNTIPGFDGVVKDAEEAVRIAREIGYPVMIKASAGGGGKGMRIAWDDEETRDGFRLSSQEAASSFGDDRLLIEKFIDNPRHIEIQVLGDKHGNALWLNERECSIQRRNQKVVEEAPSIFLDAETRRAMGEQAVALARAVKYSSAGTVEFLVDSKKNFYFLEMNTRLQVEHPVTECITGLDLVQEMIRVAKGYPLRHKQADIRINGWAVECRVYAEDPYKSFGLPSIGRLSQYQEPLHLPGVRVDSGIQPGSDISIYYDPMISKLITYGSDRTEALKRMADALDNYVIRGVTHNIALLREVIINSRFVKGDISTKFLSDVYPDGFKGHMLTKSEKNQLLAIASSLFVAFQLRAQHFQENSRMPVIKPDIANWELSVKLHDKVHTVVASNNGSVFSVEVDGSKLNVTSTWNLASPLLSVSVDGTQRTVQCLSREAGGNMSIQFLGTVYKVNILTRLAAELNKFMLEKVTEDTSSVLRSPMPGVVVAVSVKPGDAVAEGQEICVIEAMKMQNSMTAGKTGTVKSVHCQAGDTVGEGDLLVELE

SEQ ID NO: 2694 - protein, 587 aa, Homo sapiens
MTRFSYAEYFSLFHSCSAPSRSTAPPESSPARAPMGLFQGVMQKYSSSLFKTSQLAPADPLIKAIKDGDEEALKTMIKEGKNLAEPNKEGWLPLHEAAYYGQVGCLKVLQRAYPGTIDQRTLQEETAVYLATCRGHLDCLLSLLQAGAEPDISNKSRETPLYKACERKNAEAVKILVQHNADTNHRCNRGWTALHESVSRNDLEVMQILVSGGAKVESKNAYGITPLFVAAQSGQLEALRFLAKYGADINTQASDNASALYEACKNEHEEVVEFLLSQGADANKTNKDGLLPLHIASKKGNYRIVQMLLPVTSRTRIRRSGVSPLHLAAERNHDEVLEALLSARFDVNTPLAPERARLYEDRRSSALYFAVVNNNVYATELLLQHGADPNRDVISPLLVAIRHGCLRTMQLLLDHGANIDAYIATHPTAFPATIMFAMKCLSLLKFLMDLGCDGEPCFSCLYGNGPHPPAPQPSSRFNDAPAADKEPSVVQFCEFVSAPEVSRWAGPIIDVLLDYVGNVQLCSRLKEHIDSFEDWAVIKEKAEPPRPLAHLCRLRVRKAIGKYRIKLLDTLPLPGRLIRYLKYENTQ

SEQ ID NO: 2695 - protein, 285 aa, Homo sapiens
DRLDLLCPRARPPGPHSSPNYEFYKLYLVGGAQGRRCEAPPAPNLLLTCDRPDLDLRFTIKFQEYSPNLWGHEFRSHHDYYIIATSDGTREGLESLQGGVCLTRGMKVLLRVGQSPRGGAVPRKPVSEMPMERDRGAAHSLEPGKENLPGDPTSNATSRGAEGPLPPPSMPAVAGAAGGLALLLLGVAGAGGAMCWRRRRAKPSESRHPGPGSFGRGGSLGLGGGGGMGPREAEPGELGIALRGGGAADPPFCPHYEKVSGDYGHPVYIVQDGPPQSPPNIYYKV

SEQ ID NO: 2696 - protein, 399 aa, Homo sapiens
MKRTHLFIVGIYFLSSCRAEEGLNFPTYDGKDRVVSLSEKNFKQVLKKYDLLCLYYHEPVSSDKVTQKQFQLKEIVLELVAQVLEHKAIGFVMVDAKKEAKLAKKLGFDEEGSLYILKGDRTIEFDGEFAADVLVEFLLDLIEDPVEIISSKLEVQAFERIEDYIKLIGFFKSEDSEYYKAFEEAAEHFQPYIKFFATFDKGVAKKLSLKMNEVDFYEPFMDEPIAIPNKPYTEEELVEFVKEHQRPTLRRLRPEEMFETWEDDLNGIHIVAFAEKSDPDGYEFLEILKQVARDNTDNPDLSILWIDPDDFPLLVAYWEKTFKIDLFRPQIGVVNVTDADSVWMEIPDDDDLPTAEELEDWIEDVLSGKINTEDDDEDDDDDDNSDEEDNDDSDDDDDE

SEQ ID NO: 2697 - protein, 748 aa, Homo sapiens [sequence omitted]

SEQ ID NO: 2698 - protein, 209 aa, Homo sapiens
PARYPLPASAVPTAGLRATRPQRASHMEAPEEPAPVRGGPEATLEVRGSRCLRLSAFREELRALLVLAGPAVSKVASVAGRYRRAGDLVISASAGDFGGLWGPSELSAGGLRGASCQEPGGHPSSSACVPAAFRSAPPDWGPRGALRERLVRARAHVGSERPAAPASCARRHRRAGTFAPNGALPGPGCICIRGCLLWELIPANKTQVA

SEQ ID NO: 2699 - protein, 1688 aa, Homo sapiens
MSDINTLSNWFQTQKHVRRNGTQPYSQTVTTWMKPERMIMDLYSEIHPWTHPEANPVIRYWFQTQMNSIRSWNQSETEVFQIWTTQCDTVRPWIHPESLSLVQTEVGIFWPWTQQRAATYRTNAENQAPEVDIIHALIRSESFLLSFWPKVLSPVVKPWTLLIGRTLISWILPVAKADMHWIQSEADIIECFAVFKAVSASKDALTFISAPTSIWPHFISLPQPQSKAQNLASADQISLQYAMPWQAGIISCGSQVYSGSIVSSSWVLIAAHCVRNMSTSGVPNNLHLVKESPDDSVGKPPDACNSARAQRMWSRDISQTFGLSRSDVDPLFLSAPMPPRSPMPIPCCQPSGIGSCKDMALSQKPRPQGHSRSLPPSEGPPASPLMAWMAALAVGLRTTAGSTAHRSSEARGRGPVLAEPHQQAPQRLLRVREPLGRQGSAQQRARRPTMANPGGWPLVCPGHRTRGPLECSLEYSILREEAWMEAVQEGAAGVESEQAALREEAVQLLDDIMAEVEVVAQEEALVEGQEEAQKPQPGPGPIIPESALEELVAVQGKDGMEAQAPPRPQRRRHPERPWLLGPCCILLSVFSAFPVERCSRGSVSDRWAAHRRYDSLENKGELPRTNEAVESRSRRGYCFPACGRETLGDAEQQTFGASFEEQKRVQTRIRFSVNEAYRAYSTPIQQYQDYDVEPYRWGHHNSSLNFFNWFADRNFTGSNRIAEESPHWETLGMTLSLCTELWHKPLQYYMKMKPPEEGTEISDEPLSWNWSYLVPRPPHLSNPAIPWTVTVNQPTEEAQLGSALPETGAFTCMTLEPLDCSGASCPVSWRERIQKGSCQAQLPTYHSLYHAGRRSSLQMPMQYSLVITSMQKQCPSPDSHRPPPVLPDPHHRNPAAALTGACGSEGPQGACTGLQAPPTDFRQTAPGAAPTPPASPRGQSVGGRWASPWAAPTQAHRRPAARLAVDILRAHNCTLPCRPRGSRTCSSGCGACWWGSASPRPWAVAPELLCAVDPAGDLSPRSSAAICGPSRAFQETCVYVPVGLGSQQGEVCGPSGERASWGAAPEPSGAGDGLGCTDRGLREYPGGHSVQAGGSAGEDGPVPVSTRLTPETQGAKDSSLWCMGLLTSSRQPKPPAHSFCFLSLVSAGQLGLAPPNQKPPQSWCCLLAKDRGSTREGDRPNVWKIALLHILCDLAKLQGVTTLAQPIIWRLLDQRQVEELSHPGYRRLDEISFHHNLYFHNEVIIKEYFFGILGYRVSHSTAVQWDHEGQASSCRQNIAYLSLFSCLAEYDCLGFGRIAESKFGKLQFQVGSRILLNSFESGTGILSLYCLQGGSRDEFQTFVHVVTVSANILVQEFTIGVSVWVHSGTVGGRRRPPPSSRNRSPSANLRSARGSSGGKRAWLPSHEEHLGNVLKYKGGTMGLKENKFEVKSGPPSRSGGPPPTKSAPAVARSSSWMGGQEVENLKFVAYTYAHSNHPGSSESRDYAPPSRDYAYRDYGHSSQDEHSSTGNRSILIVTGLLQWVVAGWDCLSPQIFWLQEVSEGKKDFGYDSITQRTLSNTPDYISISMRPDSGTQLLRIGVRRAVSSDDLTVTKGLSFQQYPTTKTARRIAEGLSGKRRNHNKGKSRVEQCSHTSNCVLMGADEVEKFSQRLSVVITSLKNANIVVEGQCGPSMKAKINQGSPDRMS

SEQ ID NO: 2700 - protein, 112 aa, Homo sapiens
MEPECVIESNWNEIVDSFDDMNLSESLLRDIYAYGFEKPSAIQQQAILPCIRGYNVIAQARSGTGKMATFAISILQQIELDLKATQALVLAPTSRLHGCLLSCLCQGHQYAC

SEQ ID NO: 2701 - protein, 366 aa, Homo sapiens
MEECSGMLNGQDRPKHRAKAAQPPISQNGSREFNRTPGKVTGSSSESFSSSRIIEQSALGDVQHFPISILFGLMDEENGDGQLSLLSKYEVPSVRGLTLAFSGANVHEHTTVEHGLLRIWALESERKNPTRVEGGRGTSAQRSSARPSLCGKQKIERRGQSVPFPEVRGTNMDQDVPGVLLGNADDIAKFSQGFCHSPNFISVLFVDSKSQALLRTTADVGDPKIDSFPLSDHTLQWRRAQPGSLADHRLPLFCWSWCLSPERGRFLKGASWVLSKLNSMGGAHMALVQQEWLSDRDGLWETQMGKEYGAAPDASPRQLPVNIPLPHIYESCPTLQEAFLYAREDYCYPGNHRASKIQWCTFVVSS

SEQ ID NO: 2702 - protein, 289 aa, Homo sapiens
MPWAGPNGADGSTGRGAGPPDTPSRAPTPCRRRAAPTCALPDPARSAPTRTLVPEKALVSLIAVHPSIVSPLGKQLLPKTFGQSNVNVVPQVVTGTPQRPAASNTLVIETYSTANCLQEPGEERNQHAEQQASRPTTPSWLIHLPFIIVNTSKTVIDCSSISNDKFEYLFNFDNTSEIYNDIEVLKRMSMACGLESGSCSAEDLKMARSLVPKALEPYVTEMAQGTGGGVFITTARSMSNGKKLSASDLTNDTGHKLQPQYNGSRVETPVSYVGKDDEEDDFNENNKDD

SEQ ID NO: 2703 - protein, 459 aa, Homo sapiens
MAVVKNKCLMKGGKKGVKKKIIDPFSKKDQKYWKDLVTRTQGTQIASDGLKGLVFEVSLADVQNDEVAFRKLKLITEDVQGKNCLTNFYGMGLSCDKICSMFENCSTMIEAHVDVKTTDDNIGKDVEKACQFILSMMSSLEKGREFQHHFWPLKKAATIRMSSPHVTISRDSKEEGEITQRFANTFYCVFNVPVNAPLRFLSLPSTQSLEAKLTDSSDSELLRDILQKTVKHPVCVTHPPSVKYARCFLSELIKKHEAVHTEPLDELYEVLVETLMAKESTQGHWSYLLDCPRAWQWCWPHSPGHLQDVPPPGIHLQRLSQPGPQTAPRECPSQWPLIRGRHHCQLSPRVTVAQLDWDIAMVHQLSAIQPDVVIAADVLYCPEAIVLLVGVLLRLAACREHQRAPEVYVAFTVRNPETCQLFTTELGQARIRWEVEPRHDQKLFPYEEHLEMAMLNLTL

SEQ ID NO: 2704 - protein, 118 aa, Homo sapiens
MMLLSSYSRMLMVSNAHVLSARRPDLRDIITRHASGVPMSFIVSRLLCFNTGCVASTEPGGKVISRRIMGGCTGAGAMCEAGTGGPAFCIFIPECRNGDLLGEVRFSIGRGRGAGLDT

SEQ ID NO: 2705 - protein, 413 aa, Homo sapiens
MPFRVGQAKLTGEVGEGTGARSSAFHIAIQLSSWHQVLQVELQIMPKHEQGPLKIGGRKEVERQKTFVTESLKERNLIIWELREAKETHPQPLRLSLLPLSIEFLSMVVVVVVRAETELRINGKKPSKEFIVVMRKLRPKTTQSARLELDPKSYASLCYPMREQLQVMNTRPSCSIMAFKLSGSDSMFTIALTCEERRGCVEEQGPCWHQETIANNRNPVSMSVKNPQPPYLLFYEFRSTLINQNMKAVSSVARQSRLPMEGEAVTKVKIMAVTEVIYSAESPTHNHWASHGFKVIIQVKDSPECGHTLIFLEICLRDLRTSFLDWVKWVKFIIHMAPTRVPTKTSLSVCLLKAMSGPTQRQLQESVKHDASSPEDNAYITDYYDLRVSTCSPGIKNTNNLSPIFRNLKVITE

SEQ ID NO: 2706 - protein, 200 aa, Homo sapiens
MFQLHERFSKRRYCLWEKKHREGRGEIPENGKKDQRVSGKVIDSTIYILKQPHFSKVNKNGRVEYCPCEINRYKCSNSQDSILMAEAGHPQREGAGGGGRRNCDSSNGSSGSPVPCVPEAVTCIPEAVTCTDPNLVWPGLPDSNYLDASISLIIVFLPQPLLDKKVPKLATGEVLGVETAKCGIQAVVPPPALREGVLGY

SEQ ID NO: 2707 - protein, 611 aa, Homo sapiens
MDCETHHLKGIDSAAINRTKHVPAALLMARQLASQTPPLGVTMTHGSDRSKEISSDRAVNDELRLSPLAGKGPYHPTAEFTLFTATLARTRKRSICGGRSQSSLPQLVASDTQEGGQLSRASPDLWRSHTHLSTRNAWGTGAASGTLEPAGQRSRTSSTDCWLPAPSISSVRVLTTYCVPSAFSAASACRDVLQSPYFASAPWTAPGRWRQGSSTDKQLPLYCCCLVKARVTEGQHLGASEPGPVKGDTSLAQRARNLSPGNEILYQKQSRSLENKRLQIKKAISPPEQSGLTRSGSLPQSCKGLKWLCSLVPVEAGPERRREKKASESTTRWRKSSTVEWTRCRHWTQAGLTRFSLVELGNGPLRFLSSMFGSCAQICSSEIRVGSEILLLRLQQRPGEHLKGSSRVVEIGVQPEACVPANLERQVFPEIASEPQNFMFFSPETLKTSPMSSQRSPQDFSGFGNMLTGILARGFSFLDLDFRLILDNWQMGTCYAALMQRANNIDVYKILKEKLQDMPAEKTRVTTRGRCYSTIFLQKLRSANMDIRISIVFEAKSKDASGEKGQHALSDRHSYGKTEPCQLPGKPVNSPRKPSGQLRGIRDENPELFLE

SEQ ID NO: 2708 - protein, 923 aa, Homo sapiens
MPPNKRKVLGRNGEKFLGKTSMSGSSPRRGLQDREVKEAPAPGARTTEEQKHQPLTQHQLVPGPRQRRQSITVEPGSRVAPEHSILFLHPLVGGLAIEAGSSQKRTCQGQDKALHLESQFTWILTAKPTSPSLPRDLIIVSNNHPLMLRAASPHLATQVPEQGSDSASPGQQGKGTERRQGAASGGCPEEPPCKSLKVQSQYFQNVLPCLKETGTCKMQCVFAKLKPSEPSSKVLGNPSLDAQTVFQDVRAAGSSLSLFLTGDAAAAPGTENNILQTRAAQTELHTLCGPPTNAILGQTLNNENPTKIQPQLQAGFEDHISHRLPQKWVLTEEVPFGAEIQKRESPFPGCGKGHMNSHGTKNATVQASSGFLGRLTGLADANGSGAKSHLGTQDAAPSGGTEDTALLHEHPGLRTPIQTQDTPLLPRPPGRCTPTQAPRPLHSYMNTQDTEPTQILKTLHPYLGTQGRCASPRAPRTLGLLRQAPQPLAGPSVPQGTKGRKLKWNKGPGPFPLLGSGLLAHGPKPSSAALRSAALRRPGNPSPGIRSLLSAERLRLLPQRQTRRFTDFHPITGCLCQCRAQPFYVGLCAGLHGAWNQAHVEPILALPRFAVWLGSMTHASESQCLFLSHGDAASIPEAGRTLNAPDCSSPKGSHMQAPSPHTLPVTASLLLNEHPSAWPLRDSDSEKLESWVRLCPVPRRQLKTIPSHAGTLHAAIESYGDLQTYQRGSRQDEGNTRDWKSANLSSIPALHFQAMWAPRQKMRLVMPTCEGPSYLRTHLPCPNVLGTDVNSGAAGQRGECDTSPSSGGHSPVMCLGSSAKKHEAIILHMTVYNGGNMVRQHPGPKQRRLGSQQAGESTVITKDRGEARPVLQSFRRGRLGRTWRYPETNKHLQPGVGDKYHESTVKTTLNGLLSSTEGKCSTS

SEQ ID NO: 2709 - protein, 158 aa, Homo sapiens [sequence omitted]

SEQ ID NO: 2710 - protein, 1006 aa, Homo sapiens
MHYDGHVRFDLPPQGSVLARNVSTRSCPPRTSPAVDLEEEEEESSVDGKGDRKSTGLKLSKKKARRRHTDDPSKECFTLKFDLNVDIETEIVPAMKKKSLGEVLLPVFERKGIALGKVDIYLDQSNTPLSLTFEAYRFGGHYLRVKAPAKPGDEGKVEQGMKDSKSLSLPILRPAGTGPPALERVDAQSRRESLDILAPGRRRKNMSEFLGEASIPGQEPPTPSSCSLPSGSSGSTNTGDSWKNRAASRFSGFFSSGPSTSAFGREVDKMEQLEGKLHTYSLFGLPRLPRGLRFDHDSWEEEYDEDEDEDNACLRLEDSWRELIDGHEKLTRRQCHQQEAVWELLHTEASYIRKLRVIINLFLCCLLNLQESGLLCEVEAERLFSNIPEIAQLHRRLWASVMAPVLEKARRTRALLQPGDFLKGFKMFGSLFKPYIRYCMEEEGCMEYMRGLLRDNDLFRAYITWAEKHPQCQRLKLSDMLAKPHQRLTKYPLLLKSVLRKTEEPRAKEAVVAMIGSVERFIHHVNACMRQRQERQRLAAVVSRIDAYEVVESSSDEVDKLLKEFLHLDLTAPIPGASPEETRQLLLEGSLRMKEGKDSKMDVYCFLFTDLLLVTKAVKKAERTRVIRPPLLVDKIVCRELRDPGSFLLIYLNEFHSAVGAYTFQASGQALCRGWVDTIYNAQNQLQQLRAQEPPGSQQPLQSLEEEEDEQEEEEEEEEEEEEGEDSGTSAASSPTIMRKSSGSPDSQHCASDGSTETLAMVVVEPGDTLSSPEFDSGPFSSQSDETSLSTTASSATPTSELLPLGPVDGRSCSMDSAYGTLSPTSLQDFVAPGPMAELVPRAPESPRVPSPPPSPRLRRRTPVQLLSCPPHLLKSKSEASLLQLLAGAGTHGTPSAPSRSLSELCLAVPAPGIRTQGSPQEAGPSWDCRGAPSPGSGPGLVGCLAGEPAGSHRKRCGDLPSGASPRVQPEPPPGVSAQHRKLTLAQLYRIRTTLLLNSTLTASEV

SEQ ID NO: 2711 - protein, 365 aa, Homo sapiens
MGPELHPTPGSMHHCLGKYVTAIISLFLLSFFLREKIQNAEYKLLLLEYIVVLVHLSGPDPEWLGQTAATISGLFTPQIRAGKLLVINHSSPLPGDLSDVNHSSLCEALYSRQKVDHALLMNFASNLSDYFLLLEDHIHCTPKFAAAISSALSAWKELPWVILEFSHLSISGKVFCTSDFSRLNTFFLLFHKDTPTHLLLSEFRLLLAQNIPIHFSPSVFHHTGNYSVFDDMCFSVEKDRVFGEPDNPVATVLTDMVSMLAVILQYTYTLNKEGYSTLNPLKGNYLTVILDRPQKNTQIAVGRYRLQQGQVEPGYDPQEDPKSCARYALLGPLVGGNLDQVVFSEEESVEQLNCIRLLVLASQES

SEQ ID NO: 2712 - protein, 824 aa, Homo sapiens
MNILQRRTRAPEELFVPQESSGSTLEKTLVSLHGSSLRNEATPRYSQQEETGNGRWQQSLSLERWPLWTSHPFGTPPLTPVAVAQCCILPVLWPLLSPPSGSASPISQGPGCVSLWPNAFNKDDFPVRQGDTSWSCHPVIYKRERGETALKRNATFWVVKAAMWLIPHAPCVISTPSVVLHEFHPTSEKRLVQQANSIQILLFSILTKKIPKWYSLNLEQKVLSTHQEQWLPLGMKWDDGRPGEPWQEETLMMRLLAIGHAQDQSTVQILEGHHHDPKVGGKTSSPVVSKDITMILKREEKPPPQSSALDIANSTPEIPELIRITSDLGFTHTPAGNPCMSFVRKGTKETSLKSAGATQCKPTAELTQMPEWSKTNIYKAIIAISHIFKRGVPCAREAHGRVNATWNMNSEDPHFGFHEGGEGSPNKSISNKVQARRLLTQLQLQSPAVLTNNPAVCDHKSTASNWGECEGRFHREGEGASSAEEASAPPKLREDEGASSAEEASAPPKLREDEGASSAEVASAPPKLREGEGASSAEEASALRKLREGEGASSAEEAAALGKRKLREGEGASSAEEASALQKLREGEGASSAEELSALRKLTEDEGASSAEEPSAPRRSPQPCGSSRRVRAQAHQRKPQPCQSGSSGKVKAQAQQRKPQSCGSGSGSSGRVRVQAQQTEPQPCGSGSSGRGEGASSAEEASALPKRKLREGEGASSAEEVSALSKLREGEGASSAEKASALRKLGEGEGTSSAEEASALRKRKLREGEGASSAEEASALRKLREGQKSPRMQWELDYAVPFDNMISQSASCADAENFRQIREQ

SEQ ID NO: 2713 - protein, 450 aa, Homo sapiens
MLLWTAVLLFGKSTSMGIPSWSTKDLPCVGKTVWLYLQAWPNPVFEGDALTLRCQGWKNTPLSQVKFYRDGKFLHFSKENQTLSMGAATVQSRGQYSCSGQVMYIPQTFTQTSETAMVQVQELFPPPVLSAIPSPEPREGSLVTLRCQTKLHPLRSALRLLFSFHKDGHTLQDRGPHPELCIPGAKEGDSGLYWCEVAPEGGQVQKQSPQLEVRVQAPVSRPVLTLHHGPADPAVGDMVQLLCEAQRGSPPILYSFYLDEKIVGNHSAPCGGTTSLLFPVKSEQDAGNYSCEAENSVSRERSEPKKLSLKGSQVLFTPASNWLVPWLPASLLGLMVIAAALLVYVRSWRKAGPLPSQIPPTAPGGEQCPLYANVHHQKGKDEGVVYSVVHRTSKRSEARSAEFTVGRKHKASPKFHPTLDLHTKRLRVNGRVQEAYVALVNTCSLTPSLK

SEQ ID NO: 2714 - protein, 340 aa, Homo sapiens
MCLSVCEDFPSKRKTEPDMDEVPFWKAQEVGWEGERVRIVANTVIEECLVRLPSIYDHYVLDIKEHIKGMGSSSSIRQCTFVAAAVKTHLNDNPLTKDLLRIVVDLCLRDQNAGGDVVLLLKALIDNETRNKALPGKVPSRLLLLQGFVEYTGDNIDTSCRVSTTYEDTPGSRDNTFSSGRSLTLEGEKLKAPIQSQGTQLKTLTKKPAQEILRCGWKMGSLRLAAVWAFAGPRRFCGVLGCAVAGSGGRRCEGSCRGIRRAAWRGSVRDACGQAGTVPKGKGMPFGALWGADGGEGCEGRGGARVAAQGPACRRRCARAPDPRLEEEPPPPVLSKLSIG

SEQ ID NO: 2715 - protein, 474 aa, Homo sapiens
MAQPGKCSEKRINKMLVTDENISLAELAKAAGRRKPLSCVLPSVHRGLGGPNEGMTLKCEQGEGAECAQGREFTPLDAELPEKKRYRVPVAELGPSSLQRRYIKAPHEDFYSSTLDKLPLPEIEPTGKEFEPRNAETCSLSAAGLEATGTPRKIPDGGARAGGPMRKREMGEAENWLVEALHEGGDSGAVGSWRRGAKPRLAAPGQSRIRRGGCARRGAPGPGPRPSARGRLEGVRAADDQGAPAPGCAPGTRTVHPEVACAPKPGTSAARQGKGLCDPSPPQCVCWGVQHPPCATRVLAPALDHSPLASATRLAQSPAPRPRLPLKQWLRQLGPTWRPRLPAWGLRQKRSGAARAAQRTRADSSLQDRAMEYVLVHSWLCSAGGREEATFTPSSTCTSVEGTLSGQAAALGNRRSLGPSPCRRLCEPLQPAFLLASGEDYNIPFHLDITSSLAKHLYSHYLIEPSGKSIDLGQ

SEQ ID NO: 2716 - protein, 108 aa, Homo sapiens
MRYQRRVRAPAPAAGASAPAWFCEKEAGLGPLGAGPSPPLKIKVWGEGPDTRTYLQEAFSESRAELISTTSTYRWLARCQAGRHRASGGCGAPGRLRTKRPLGTEALI

SEQ ID NO: 2717 - protein, 242 aa, Homo sapiens
MGAPRRDMELLSNSLAAYAHIRSQPRELRPLLRAGRLLRPAAHPLPARHQHLVGAPPAAPGPGSAPGPPQQHPGARGRRRGRGGHGDSAGPRRHAAGPRAVRRAGRAPQRQRLHVGGGAGAGAAAGGARTDPAGDLAHRAAGPAGHRHAGAQPHGHGHPGPHALLLMGPGSRCKALGVPDLHMSSELPHTFGLPRPPQLPGATGRGPPPPERLPSPVLPEDPGGGEGAACRVPTPSLGSMKR

SEQ ID NO: 2718 - protein, 107 aa, Homo sapiens
MVANVKSLVVVASIFIVNEPHVTYDAVIDDILAEQVIVTKHHRGLQLGQMLLQPGQLPFQHLYLRDICRKAGVDLVLHKREIIVHLVPEDGLGQAAVGVDSMNLCHF

SEQ ID NO: 2719 - protein, 298 aa, Homo sapiens
MENEERGGEGEIQKIGGKPWEQIKAGNQRNQSQRASQEELMATSTEYHRIWNPRKPFSYTKAFQFIATALKNSLHNYTWNLLGQEGKALQCNGDSSEMFPLTLEMAEIKFAICGRLFAIIIDSEALIGKQNKPKTPGLMKTNMEASDHVLQLLAMSESLAILKESHSVCLIKATIFLTCSGAGPLKENAGRHLATGLSQTLKHRAVLVLAVGDGLLPPRFMNCHISLFDPPRVSSVPRSLLHVIALFQIIARENAKVGNDQDIDETPLTQSWGTCEAREGSMLGVVLGDEKVTDPDLE

SEQ ID NO: 2720 - protein, 287 aa, Homo sapiens
MLSARRGRVGAGGGQTLLWSWLSVALSGAEDWLGRQVSRPSEDSDRGLYKKQAMAKKRTPSTWGERSPLDLVGSSARAFGYWWACPSPVPAPACSTLTRSTETHPALRGNLTQSQSPVTTTAGVQAPVPPSWAVLNLQGLGFFVNNEGLHRLCRARGRCGRNPTWAPKADKVECEGVYKETPCAPPLQLTWTHALLRPTLTLWIRLPLAVLSPGDGCVWRALSLLLPAKGCIQHSKERVWGRLPGKVQQPPHPQTLRPLWTPPAGASPPCEGLVAVVLLEGRTEGTL

SEQ ID NO: 2721 - protein, 105 aa, Homo sapiens
MPFLDIQKRFGLNIDRWLTIQSGEQPYKMAGRCHAFEKEWIECAHGIGYTRAEKECKIEYDDFVECLLRQKTCIRNSECVSLVLTLELLSPASECLERNYSVNDD

SEQ ID NO: 2722 - protein, 2419 aa, Homo sapiens
MEQFPKETVVESSGPKVLETAEEIQERRQEVLTRYQSFKERVAERGQKLEDSYHLQVFKRDADDLGKWIMEKVNILTDKSYEDPTNIQGKYQKHQSLEAEVQTKSRLMSELEKTREERFTMGHSAHEETKAHIEELRHLWDLLLELTLEKGDQLLRALKFQQYVQECADILEWIGDKEAIATSVELGEDWERTEVLHKKFEDFQVELVAKEGRVVEVNQYANECAEENHPDLPLIQSKQNEVNAAWERLRGLALQRQKALSNAANLQRFKRDVTEAIQWIKEKEPVLTSEDYGKDLVASEGLFHSHKGLERNLAVMSDKVKELCAKAEKLTLSHPSDAPQIQEMKEDLVSSWEHIRALATSRYEKLQATYWYHRFSSDFDELSGWMNEKTAAINADELPTDVAGGEVLLDRHQQHKHEIDSYDDRFQSADETGQDLVNANHEASDEVREKMEILDNNWTALLELWDERHRQYEQCLDFHLFYRDSEQVDSWMSRQEAFLENEDLGNSLGSAEALLQKHEDFEEAFTAQEEKIITVDKTATKLIGDDHYDSENIKAIRDGLLARRDALREKAATRRRLLKESLLLQKLYEDSDDLKNWINKKKKLADDEDYKDIQNLKSRVQKQQVFEKELAVNKTQLENIQKTGQEMIEGGHYASDNVTTRLSEVASLWEELLEATKQKGTQLHEANQQLQFENNAEDLQRWLEDVEWQVTSEDYGKGLAEVQNRLRKHGLLESAVAARQDQVDILTDLAAYFEEIGHPDSKDIRARQESLVCRFEALKEPLATRKKKLLDLLHLQLICRDTEDEEAWIQETEPSATSTYLGKDLIASKKLLNRHRVILENIASHEPRIQEITERGNKMVEEGHFAAEDVASRVKSLNQNMESLRARAARRQNDLEANVQFQQYLADLHEAETWIREKEPIVDNTNYGADEEAAGALLKKHEAFLLDLNSFGDSMKALRNQANACQQQQAAPVEGVAGEQRVMALYDFQARSPREVTMKKGDVLTLLSSINKDWWKVEAADHQGIVPAVYVRRLAHDEFPMLPQRRREEPGNITQRQEQIENQYRSLLDRAEERRRRLLQRYNEFLLAYEAGDMLEWIQEKKAENTGVELDDVWELQKKFDEFQKDLNTNEPRLRDINKVADDLLFEGLLTPEGAQIRQELNSRWGSLQRLADEQRQLLGSAHAVEVFHREADDTKEQIEKKCQALSAADPGSDLFSVQALQRRHEGFERDLVPLGDKVTILGETAERLSESHPDATEDLQRQKMELNEAWEDLQGRTKDRKESLNEAQKFYLFLSKARDLQNWISSIGGMVSSQELAEDLTGIEILLERHQEHRADMEAEAPTFQALEDFSAELIDSGHHASPEIEKKLQAVKLERDDLEKAWEKRKKILDQCLELQMFQGNCDQVESWMVARENSLRSDDKSSLDSLEALMKKRDDLDKAITAQEGKITDLEHFAESLIADEHYAKEEIATRLQRVLDRWKALKAQLIDERTKLGDYANLKQFYRDLEELEEWISEMLPTACDESYKDATNIQRKYLKHQTFAHEVDGRSEQVHGVINLGNSLIECSACDGNEEAMKEQLEQLKEHWDHLLERTNDKGKKLNEASRQQRFNTSIRDFEFWLSEAETLLAMKDQARDLASAGNLLKKHQLLEREMLAREDALKDLNTLAEDLLSSGTFNVDQIVKKKDNVNKRFLNVQELAAAHHEKLKEAYALFQFFQDLDDEESWIEEKLIRVSSQDYGRDLQGVQNLLKKHKRLEGELVAHEPAIQNVLDMAEKLKDKAAVGQEEIQLRLAQFVEHWEKLKELAKARGLKLEESLEYLQFMQNAEEEEAWINEKNALAVRGDCGDTLAATQSLLMKHEALENDFAVHETRVQNVCAQGEDILNKVLQEESQNKEISSKIEALNEKTPSLAKAIAAWKLQLEDDYAFQEFNWKADVVEAWIADKETSLKTNGNGADLGDFLTLLAKQDTLDASLQSFQQERLPEITDLKDKLISAQHNQSKAIEERYAALLKRWEQLLEASAVHRQKLLEKQLPLQKAEDLFVEFAHKASALNNWCEKMEENLSEPVHCVSLNEIRQLQKDHEDFLASLARAQADFKCLLELDQQIKALGVPSSPYTWLTVEVLERTWKHLSDIIEEREQELQKEEARQVKNFEMCQEFEQNASTFLQWILETRAYFLDGSLLKETGTLESQLEANKRKQKEIQAMKRQLTKIVDLGDNLEDALILDIKYSTIGLAQQWDQLYQLGLRMQHNLEQQIQAKDIKGVSEETLKEFSTIYKHFDENLTGRLTHKEFRSCLRGLNYYLPMVEEDEHEPKFEKFLDAVDPGRKGYVSLEDYTAFLIDKESENIKSSDEIENAFQALAEGKSYITKEDMKQALTPEQVSFCATHMQQYMDPRGRSHLSGYDYVGFTNSYFGN

SEQ ID NO: 2723 - protein, 856 aa, Homo sapiens
MGLVAPVGPASPASLWPAAPGLLSLAPPRPTALSLCHGLRGRTRLERESLRAGAPDSPWPLVVEIAPTSPTSRSRANGRVRPHPPSLAFAPQGSDPDRMDRDYGPGSYGGLTFKDIYLKILLLSASKGMDRDYGHGSYGGQRSMDSYLNQSYGMDNHSGGGGGSRFGPYESYDSRSSLGGRDLYRSGYGFNEPEQSRFGGSYGGRFESSYRNSLDSFGGRNQGGSSWEAPYSRSKLRPGFMEDRGRENYSSYSSFSSPHMKPAPVGSRGRGTPAYPESTFGSRNYDAFGGPSTGRGRGRGHMGDFGSIHRPGIVVDYQNKSTNVTVAAARGIKRKMMQPFNKPSGTFIKKPKLAKPMEKISLSKSPTKTDPKNEEEEKRRIEARREKQRRRREKNSEKYGDGYRMAFTCSFCKFRTFEEKDIELHLESSSHQETLDHIQKQTKFDKVVMEFLHECMVNKFKKTSIRKQQTNNQTEVVKIIEKDVMEGVTVDDHMMKVETVHCSACSVYIPALHSSVQQHLKSPDHIKGKQAYKEQIKRESVLTATSILNNPIVKARYERFVKGQKLDNKLGERRNAEGWKARCNAFFLMNPQLQKKSECHSYYHRQLWAASCISQGNLEVHILKTEVEKELVIGSGVHGRKPLTGAHDVTWRERQETERQVLNGSQFLLPNGQLFILDLGFFEELDTIGQCIMAFTCSFCKFRTFEEKDIELHLESSSHQETLDHIQKQTKFDKVVMEFLHECMVNKFKKTSIRKQQTNNQTEVVKIIEKDVMEGVTVDDHMMKVETVHCSACSVYIPALHSSVQQHLKSPDHIKGKQAYKEQIKRESVLTATSILNNPIVKARYERFVKVSDMYP

SEQ ID NO: 2724 - protein, 116 aa, Homo sapiens
MKAAAKVVESKRIRTITSQDQPNGNDTEIETEANLDTRKRSHKNLFLSKLKLISEAEKAKQKIAPVFFREEYMLNNAVDFSMAETHELQEALIKRDRSQPAAVDRASHLRPLIEKS

SEQ ID NO: 2725 - protein, 662 aa, Homo sapiens
MDDAVMDNVKQIFGFESNKKNLVDPFVEVSFAGKMLCSKILEKTANPQWNQNITLPAMFPSMCEKMRIRIIDWDRLTHNDIVATTYLSMSKISAPGGEIEEEPAGAVKPSKASDLDDYLGFLPTFGPCYINLYGSPREFTGFPDPYTELNTGKGEGVAYRGRLLLSLETKLVEHSEQKVEDLPADDILRVEKYLRRRKYSLFAAFYSATMLQDVDDAIQFEVSIGNYGNKFDMTCLPLASTTQYSRAVFDGCHYYYLPWGNVKPVVVLSSYWEDISHRIETQNQLLGIADRLEAGLEQVHLALKAQCSTEDVDSLVAQLTDELIAGCSQPLGDIHETPSATHLDQYLYQLRTHHLSQITEAALALKLGHSELPAALEQAEDWLLRLRALAEEPQNSLPDIVIWMLQGDKRVAYQRVPAHQVLFSRRGANYCGKNCGKLQTIFLKYPMEKVPGARMPVQIRVKLWFGLSVDEKEFNQFAEGKLSVFAETYENETKLALVGNWGTTGLTYPKFSDVTGKIKLPKDSFRPSAGWTWAGDWFVCPEKTLLHDMDAGHLSFVEEVFENQTRLPGGQWIYMSDNYTDVNGEKVLPKDDIECPLGWKWEDEEWSTDLNRAVDEQAGSIASPSPRSGSRSTGSLLRRCTTHTDGGAGCACAGGISAKWKH

SEQ ID NO: 2726 - protein, 329 aa, Homo sapiens
MTPFVGQKVLHLVNIQMDVKKELEQTCSDVVGGRKRCFSDEWRLGTSAEMVLLNHTASVLCHSMKGRQECRSFPMPPDKLQGLLRSALDVSSLVKAKGFHRKRARPWRAYPEPFMGSRTQLLQYPFIPNHLSTPPPFIFSALLNISNTWYTSILLIPSPNDLAISHIQKGQLWRTTVKNARLSKDENSLNIYYSGKSKKLGTTGSGMAGCGQAGEPGGRESRRDPTVPAESVHPGEILTQDPRGTLLRILTFVLLEVLRNAVNPLAQGAANFIYKRSKSREPEALLQYSTLSHSTDRSPIDMMQMSGHGCDLTRCHLQNQAVGWVWPLL

SEQ ID NO: 2727 - protein, 857 aa, Homo sapiens
MEPDGGNRPPPLRTRPGHPPVPPTGPVKVTGLVLVSPKHQLLKLLKEGEESKEDCEERSLSCHVGKLGCKTSQSTEVSIRKIPASQRRCHRKQKSKHTSQRQVPTLENPVSLTIKGTVLTGIAASRYWNVEGITRPRLAVGPGYGVSEPGRQHSACRAGILDSRLPERQWLLQNCHGATGSWGRQQGPCINHHVLDVSVIPLYNISGPEPPKWKREAGTSPTGLERPVLSAAPPSQVRKSPQITGCSLICSPHPGFPAHTSRLVNAEVPMMRAAGRGWGHEQMPWPRRKSADTVSLQKGEVPRPGHGVTKSHPGRALRASPEPNPRLWFEHSQLLHGSPKAFVFVHQLSVNMLYRLLVSKTANNSSQHVPDMADNAVCNTSSPHLDTRQWCSQPPSQQSIDEVASNQRGKPTSTVIVLCVVFSISSPAPAPGPPPLTMSPCPGPSVNGPHFTSLKAFRKPLSPRPPGINETIRLPSRRGWRDVSTVCLKLSKAQTPGPATRQLNKDTQSQCQGILRHQKISPQILKNKSHQSPQVFADLPTSLEGAASLSDPSILPSSCPAQQRFMDSCGVQGTVRPWYHNELGGERPLESSSATISPNHILSTSQACITEVLEFESSTHDVRTVQRSEGLELRKEALWTKPLKTWLGAGRSPRGAARTLQSRPLEQFSPRRRLPSRWESMQPSHGKSAMVLKLCPQRNTCALTLEWTSGEWKGQQVRSQKDPGLQVRSQKDPGLQVRSQKDPGLQVRSQKDPGLQVRSQKDPGLQVRSQKDPGLQVRSQKDPGLQVRSQKDPGLQSPLPVSMLKGGRRQCLIECRIMNPIVLDLLHHHCVVRVPPEAKHPDFRHPSSRASAKPRSE

SEQ ID NO: 2728 - protein, 285 aa, Homo sapiens
MSRALDVLPMKEEDVLKFLSAGTHLGGTNLDFQMEQYIYMKSDGIYILNQKKTWEKFLLAAHAIVVIEIPADVSVISSRKTGQKGTPILAAVTGATLVTGCFTPRIFTNQIQAAFQEPWLLADHQPLTEASYVNLPTIALCHTDSPLCYVEVVIPCNNKGAHSGGLTWWMLAQKVLHMPGTISHKHPWDVMPDFYICRDPEEMEKDQAAAEKAVTNEEFQDERTMPAPELSATQSEGADWSEGTCRCPLCLFSSSLLKPGPATGGWCAAPTAPATEWVEATTEWS

SEQ ID NO: 2729 - protein, 200 aa, Homo sapiens
MHLWGRRKQASKQGANVTAKPPAYGFQPPQIPAHSPAGLPPERSPRALGLAEGALLERGGPSDSAAQTPPPSLPPRPVSELDWVPTSSQKVKVSKSGAAVSVEWCVQRAARAMHCAGLAGAAHARSSRAARKLLMQGAAMQELKQRAALAVLWAPCGMQCRNQPVQHACQSGSSPTLPLGKPTPILTGMAAGGLPKPNLS

SEQ ID NO: 2730 - protein, 451 aa, Homo sapiens
MGPSRLPQLCIQPDVALCWAAVQSDRQNAVYKGVETDNRWQLSTSWRLQRGVADYLAFGNRALLPAGGPQPWAVPEGSSEMMRVQKGKLEVIVGLLLTDEEIESTLKMKSPLYQNLNSPPTVICVSPETFGLSVHGAPASSTYILTLFPGTPHSLFPLATPGASPDIGSPSLQGPQLKNPGNKGRSQICIVQSSADALPSSRCTNPSSTFTSLQSALRSSWAHPHSFLTLNPNAHPEKQQPSVGAGATNEALIPQLTYEKFLIIRDFILVNPVDPLWMVCQGLLGLLLVEECPEAMLEVTSHSLTLLSPTDAHQAAETGTCGGLTVRSSVQVLSILFAGPHACRAPPQKAGPDSDQQGLQGRSAGLRQRLGRRLGVAGEPLHVLPFSRVHGALEAQMLAKWRERSRDEDSGGIPAISSTLRAQLPVEQAGRALRVGRGEGWGLPKTAPCTD

SEQ ID NO: 2731 - protein, 105 aa, Homo sapiens
MNSNCLLQAMKTQVAVVSDGGILRALSLKELIGNRMMSPPWVKPRRPQFADMDEIFSVRLSLMDYDSRGHQLGVFKGVWFVGVDTGLRQKWDGSQAMTGQFTWLM

SEQ ID NO: 2732 - protein, 91 aa, Homo sapiens
MACQFLFYSVNVHSSHVGGRCHHTHFTDENTEPLRFNNLSKLAQLEDGRARTGPRVVRLENPGPICCTKLKGQEEERKRRDNSVPEVSVLD

SEQ ID NO: 2733 - protein, 137 aa, Homo sapiens
MWVYLRLTVSRDRQSNGCIEALLLGIYNLEIADKDGNNKVLSFTIPSLSKPSIYHEPSTIGSMALTEGALCQHDLIRVVYSDLHPQRETFTAQNRFEVLSFLMLCYNSAIVYMPASSYQSLCRMGSRGLCEWLSTAT

SEQ ID NO: 2734 - protein, 684 aa, Homo sapiens
MRAEKRKKNAPEEVSRLKSILKLDDDVLMKDVQEIATVVVPKPKHCQEKMQCEVKDEKDDMKMETDIKRNKKTLLDQHGQYPIWMNQRQRKRLKAKREKRKEKNKAKAVKVAKGLACSIVSIIVHFAEIRRRIKLREKEEAKRGKVVATCRNLKNMCDKAAIISASRAAAARLRGTAASPGPTAARQQDGWNGLSHEAFRIVSRQDYASEAINGAAGGVYLGTTNSCVAVMEGKQAKVLENAEGARTTPSVVAFTADVQKDIKNIPFKIVCASNGDAWVEAHGKLYSPSQIGAFVSMKMKETAENYLGHTAKNAVIAVPAYFNDLQRQATKDAGQISGLNVLRVINEPTAAALAYGLDKSKDKVIAVYDLGGGTFDISILEFQKGVFEVKSTNGDTFLGGEDFDQALLQHIVKEFKRETGVDLTKDNVAFQRVWEAAEKAKCELSSSVQTDINLPYLTMDSSGPKHLNTKLTHAQFEGIVTDLIRRTIAPCQKAMQDAEVSKSDIGEVILVEPPSKAVNPDEAVAIGAAIQGDVLAGDVTDVLLLDVIPLSLGIETLRGVFTKLINRNTTIPTKKSQVFSTAADGQTQVEIKVCQGEREMAGDNKLLGQFTLIGIPPAPRGVPQIKVTFDIDANGIIHVSAKDKGTGHEQQIVIQSSGGLSKDDVENMVKNAEKYAKEDQRRKE

SEQ ID NO: 2735 - protein, 232 aa, Homo sapiens
MSKSGEGRTGYNAEQNLTPGIESKMQNIAVVTELNIDDSSDFDQKPCYLKTYPKHKVLNTTLFESWEIVGPYPSWWVFNLLLLLVQGLNCFWSYLIVKIACKAVSRGKVSKDDRSDIESSSDEEDSEPPGKNPHTATTTNGTSGTNGGHSVAAEKACPRGCWNPSNKYLEDRAEQISLLGEGITVARSGMMGAKLGMEMSAQEDSAAGRIVAQGGGEEESTQGGSEELEEEA

SEQ ID NO: 2736 - protein, 103 aa, Homo sapiens [sequence omitted]

SEQ ID NO: 2737 - protein, 97 aa, Homo sapiens
MLNPQMGKAIQVIPPLHSSRIPNKLLFASEMMGRRRVMPSGTYVLIGQRWHYWEHGILVFPVGISKEKHRAPKEAAALMEQTVPLTSEKNHSTVSRG

SEQ ID NO: 2738 - protein, 56 aa, Homo sapiens
MCLQIGYPAVASVPHFIINGYKEVLALSVETDCTFPLAEKVKTFLADLPALWLLPV

SEQ ID NO: 2739 - protein, 116 aa, Homo sapiens; identical to SEQ ID NO: 2475

SEQ ID NO: 2740 - protein, 365 aa, Homo sapiens
MEEDNWRWHFYDTVKGSDWLGDQDAIHYVTEQAPTAMVAVENYGMPFSRTEDGKIYQRAFGGHSLKFGKGGQAHGCCCVADRTGHSILHTLYGRSLRYDTSCFVEYFALDLLMENGECRGVFALCIQDGSIHRIRAKNTIVATGGYWRNYLSCTSAHTSTSDGTAMITRAGLPCQDLEFVQFHPTGTYGAGCLITEGCRGEGGILINSQGERFMERYAPIAKDLASRDVVSRWMTLEIREGRGCGPEKDHVYLQLHHLPPEQLAMPLPGISETAMIFAGVDVTKEPIPVLPTVHYNMDGIPTSYEGQVLRHGNGQDQIVPGLYACGEAACASAHGVNRLGANSLLDLVVWSGMCPEHRRVVQAWR

SEQ ID NO: 2741 - protein, 102 aa, Homo sapiens
MSVDTGGAFPFSNAEGWPLMGQMKHCQFEVAVQGKLRCESHWYKTLLSGLQAFWVFSDEDKLYSENWAALLVFDPRGTFVQQSEIYNTIQGAAASTHQCQAA

SEQ ID NO: 2742 - protein, 209 aa, Homo sapiens
MVALSPAHPRSPALCSCALLATSFPLYPALTKYACVMCSDPSVPLPAPRSQRSRAWKSPKFTAVAPSFYMRMHHSNDLSRNVLIDNVLLHAREEPDPCSGTSCVAGTSVTRDTPAGINRPDLDTCIAAARLASVSSAKEFLVVLTERGQVLLDAEARKQVAGNENGPKPRANIELQQQGCWRGRSLPGRQKLFSKENLGTVAPSPLGTG

SEQ ID NO: 2743 - protein, 361 aa, Homo sapiens
MDDFRTSAPEPRGPPNPNVEYIPFDEMKERILKIVTGFNGIPFTIQRLCELLTDPRRNYTGTDKFLRGVEKNVMVVSCVYPSSEKNNSNSLNRMNGVMFPGNSPSYTERSNINGPGTPRPLNRPKVSLSAPMTTNGLPESTDSKEANLQQNEEKNHSDSSTSESEVSSVSPLKNKHPDEDAVEAEGHEVKRLRFDKEGEVRETASQTTSSEISSVMVGETEASSSSQDKDKDSRCTRQHCTEEDEEEDEEEEEESFMTSREMIPERKNQEKESDDALTVNEETSEENNQMEESDVSQAEKDLLHSEGSENEGPVSSSSSDCRETEELVGSNSSKTGEILSESSMENDDEATEVTDEPMEQD

SEQ ID NO: 2744 - protein, 203 aa, Homo sapiens
MSWDCTMFGWNLDGNARGSVKLGDTGRYTCIASTPSGEATWSAYIEVQEFGVPVQPPRPTDPNLIPSAPSKPEVTDVSRNTVTLSWQPNLNSGATPTSYIIEAFSHASGSSWQTVAENVKTETSAIKGLKPNAIYLFLVRAANAYGISDPSQISDPVKTQDYRANDTVPPTIPYNQSYDQNTGGSYNSSDRGSSTSAVCQLFS

SEQ ID NO: 2745 - protein, 284 aa, Homo sapiens
MNDSERPVSSEDFSRAVLSYQPPSPSNALKQAKLLQANIPSANIPSATSSLSPVLTPFALKPDGTRLFPNVMSPLASDLLPQMPGSMLFQSPFSIVALEPSKKGKRKPPNISTVDLKPKDEAVLYKHKMTALLAAQPRQQAKQHGCMWCGKNFSSTGALRIHGWTHTGEKSFPSMPSGSLAMKTSEISVVRSGGVPNLLLSLGASSIVNNTTVFKMDGSQSGISADVEKPGLWSTVGEDFLWKPLASLLPKMQARGGVQLREECLDFWKYGLLVSFWIINHEGY

SEQ ID NO: 2746 - protein, 208 aa, Homo sapiens
MSLGGASERSVPATKIEITVSCRNLLDLDTFSKSDPMVVLYTQSRASQEWREFGRTEVIDNTLNPDFVRKFVLDYFFEEKQNLRFDVSTSGPTPSTQPCPQQPLTWPRPRLDRLTTQPTLTPPQKETKAEFGSTAAHPSTQNFHQDSVPDPFPPSPPPSPTPHRFHSFPRYNVDSKTNISKPDFLGQAFLALGEVIGGQGSRVERTLT

SEQ ID NO: 2747 - protein, 1329 aa, Homo sapiens
  VARIANT 112, 113, 114, 115, 116, 117, 118, 119, 120, 121, 122, 123,124, 125, 126, 127, 128, 129, 130, 131, 132, 133, 134, 135,136, 137, 138, 139, 140, 141, 142, 143, 144, 145, 146, 147,148, 149, 150, 151, 152, 153, 154, 155, 156, 157, 158: Xaa = Any Amino Acid
  VARIANT 159, 160, 161, 162, 163, 164, 229, 230, 231, 232, 233, 234,235, 236, 237, 238, 239, 240, 241, 242, 243, 244, 245, 246,247, 248, 249, 250, 251, 252, 253, 254, 255, 256, 257, 258,259, 260, 261, 262, 263, 264, 265, 266, 267, 268, 269: Xaa = Any Amino Acid
  VARIANT 270, 271, 272, 273, 274, 275, 276, 277, 278, 279, 280, 281,282, 283, 284, 285, 286, 287, 288, 289, 290, 291, 292, 293,294, 295, 296, 297, 298, 299, 300, 301, 302, 303, 304, 305,306, 307, 308, 309, 310, 311, 312, 313, 314, 315, 316: Xaa = Any Amino Acid
  VARIANT 317, 318, 319, 320, 321, 322, 323, 324, 325, 326, 327, 843,844, 845, 846, 847, 848, 849, 850, 851, 852, 853, 854, 855,856, 857, 858, 859, 860, 861, 862, 863, 864, 865, 866, 867,868, 869, 870, 871, 872, 873, 874, 875, 876, 877, 878: Xaa = Any Amino Acid
  VARIANT 879, 880, 881, 882, 883, 884, 885, 886, 887: Xaa = Any Amino Acid
MKNTGKTVAILLKDDYFVSGAGLPGRFKAEKVEFHWGHSNGSAGSEHSINGRRFPVEMQIFFYNPDDFDSFQTAISENRIIGAMAIFFQVSPRANSALDPIIHGLKGVVHHXXXXXXXXXXXXXXXXXXXXXXXXXXXXXXXXXXXXXXXXXXXXXXXXXXXXXLEAFYSIFTTEQQDHVKSVEYLRNNFRPQQRLHDRVVSKSAVRDSWNHDMTDFLENPLGTEASKXXXXXXXXXXXXXXXXXXXXXXXXXXXXXXXXXXXXXXXXXXXXXXXXXXXXXXXXXXXXXXXXXXXXXXXXXXXXXXXXXXXXXXXXXXXXXXXXXXXNTTRIFQGTRIVKTGVPTASPASSADMAPISSGSSTWTSSGIPFSFVSMATGMGPSSSGSQATVASVVTSTLLAGLGFGGGGISSFPSTVWPTRLPTAASASKQAARPVLATTEALASPGPDGDSSPTKDGEGTEEGEKDEKSESEDGEREHEEDGEKDSEKKEKSGVTHAAEERNQTEPSPTPSSPNRTAEGGHQTIPGHEQDHTAVPTDQTGGRRDAGPGLDPDMVTSTQVPPTATEEQYAGSDPKRPEMPSKKPMSRGDRFSEDSRFITVNPAEKNTSGMISRPAPGRMEWIIPLIVVSALTFVCLILLIAVLVYWRGCNKIKSKGFPRRFREVPSSGERGEKGSRKCFQTAHFYVEDSSSPRVVPNESIPIIPIPDDMEAIPVKQFVKHIGELYSNNQHGFSEDFEEVQRCTADMNITAEHSNHPENKHKNRYINILAYDHSRVKLRPLPGKDSKHSDYINANYVDGYNKAKAYIATQGPLKSTFEDFWRMIWEQNTGIIVMITNLVEKGRXXXXXXXXXXXXXXXXXXXXXXXXXXXXXXXXXXXXXXXXXXXXXGQKGNPKGRQNERVVIQYHYTQWPDMGVPEYALPVLTFVRRSSAARMPETGPVLVHCSAGVGRTGTYIVIDSMLQQIKDKSTVNVLGFLKHIRTQRNYLVQTEEQYIFIHDALLEAILGKETEVSSNQLHSYVNSILIPGVGGKTRLEKQFKLVTQCNAKYVECFSAQKECNKEKNRNSSVVPSERARVGLAPLPGMKGTDYINASYIMGYYRSNEFIITQHPLPHTTKDFWRMIWDHNAQIIVMLPDNQSLAEDEFVYWPSREESMNCEAFTVTLISKDRLCLSNEEQIIIHDFILEATQDDYVLEVRHFQCPKWPNPDAPISSTFELINVIKEEALTRDGPTIVHDEYGAVSAGMLCALTTLSQQLENENAVDVFQVAKMINLMRPGVFTDIEQYQFIYKAMLSLVSTKENGNGPMTVDKNGAVLIADESDPAESMESLV

SEQ ID NO: 2748 - protein, 144 aa, Homo sapiens
MCKKVCLASSSCLMAAGGSGTHRKSGTERSSADKKWQRLSKGKAAAATGPTCSALQLHRRPTAKFLVMDQFENQKQQQIFKHYANKGTSADRNEVEQSNVIEGCANSSLNRQEKQIERRLEITPNNVQVLLKLALGLDIMQARR

SEQ ID NO: 2749 - protein, 556 aa, Homo sapiens
  VARIANT 529: Xaa = Any Amino Acid
MLADKIGIFPISYVEFNSAAKQLIEWDKPPVPGVDAGECSSAAAQSSTAPKHSDTKKNTKKRHSFTSLTMANKSSQASQNRHSMEISPPVLISSSNPTAAARISELSGLSCSAPSQVHISTTGLIVTPPPSSPVTTGPSFTFPSDVPYQAALGTLNPPLPPPPLLAATVLASTPPGATAAAAAAGMGPRPMAGSTDQIAHLRPQTRPSVYVAIYPYTPRKEDELELRKGEMFLVFERCQDGWFKGTSMHTSKIGVFPGNYVAPVTRAVTNASQAKVPMSTAGQTSRGVTMVSPSTAGGPAQKLQGNGVAGSPSVVPAAVVSAAHIQTSPQAKVLLHMTGQMTVNQARNAVRTVAAHNQERPTAAVTPIQVQNAAGLSPASVGLSHHSLASPQPAPLMPGSATHTAAISISRASAPLACAAAAPLTSPSITSASLEAEPSGRIVTVLPGLPTSPDSASSACGNSSATKPDKDSKKEKKGLLKLLSGASTKRKPRVSPPASPTLEVELGSAELPLQGAVGPELPPGGGHGXGRLLPCGRGRTGHDCSGRSSPGPGCFS

SEQ ID NO: 2750 - protein, 495 aa, Homo sapiens
MAFAASLAELQAEASCPICLDYMKDHSLWAQLLSLLHPQCWEDLQDVLPCPVCLRHCPDENLRSNTQLCHMTDMVQQLLTMRSKRKWQEEEPLCGKHSQRLALFCEKGLELLCPQCRVSSDHQYHRLMPIEQAAARNRRKLESYIKPLKKETEHAKMRCEVPILSSLNVKRKMATWRKELQSEFKEIKYFLVKKQAAIHARLLTEEKDDKEKLTENRRQISDHLSTLQNFLNEVTEKCFRADLDVLTGVENTYNTYDNLKTPAVFSYKLKKESLSFPPHYFGLQRIISTFQEDLMLDPETAHPSLIISRDRKNVIFRMRKPHFTDNPPSFSFYPAVWSCEGFDAGRHFWQVEVRGTGACSLVQPLPLTPGQPLLPPGSQGHEQSQPLLCLSRRSMPGVLRQWTGREQGEGVDSEDQEVPRGSSAGAPHPSDEADSGEDTKMGKNKFVHSRSFYFCRIPYVLKKLSDQDECIMAHEGRIKCYGDEKAMITGKFPDP

SEQ ID NO: 2751 - protein, 478 aa, Homo sapiens
MAGGVQGIQEASWLALDPISHSTPGLGLLSVVSKATGTPLAKQNVIPEICALLCMPLVLFSLPYSVTSQIYNEHLPRTMSGLGQQTAPAVKEPAGLWGRHAIKRQLQERQWDECQTDVSAKYGRSSEEASSLVAWDRRLAGLPTSHPSPPCALLPECLPEHSYPICEHMVESPTCSQMSNLVCGTDGLTYTNECQLCLARIGLTETELSIFPLPGIGILEPRMSTSAAKAHEQWHPGGEAQEADLVPAPFTARGATALSTCCSDHSDLWYPVGPAHCHISPECLPRSASVEAGLLLSGPYVQVFSVLGLPGTVLCNEKHDLHVTSQQGSSEPVVQDLAQVVEEVIGVPQSFQKLIFKVLLCPNRNPDGKGKCLAISVIYQHENITVLIIKFKRFNLFAISSPPRKDKLILPAFHELPPNSRLIAFAHSYSREHRSDCLKCGSGADSCGGSFMTQQQLNCGRDSISVKLASSAVCLEVF

SEQ ID NO: 2752 - protein, 472 aa, Homo sapiens
MEDDSLYLGGEWQFNHFSKLTSPRPDAAFAEIQRTSLPEKSPLSCETRVDLCDYLAPVARQLAPREKLPLSSRRPAAVGAGLQNMGNTCYVNASLQCLTYTPPLANYMLSREHSQTCHRHKGCMLCTMQAHITRALHNPGHVIQPSQALAAGFHRGKQEDAHEFLMFTVDAMKKACLPGHKQVDHHSKDTTLIHQIFGGYWRSQIKCLHCHGISDTFDPYLDIALDIQAAQSVQQALEQLVKPEELNGENAYHCGVCLQRAPASKTLTLHTSAKVLILVLKRFSDVTGNKIAKNVQYPECLDMQPYMSQQNTGPLVYVLYAVLVHAGWSCHNGHYFSYVKAQEGQWYKIDDAEVTASSITSVLTQQAYVLFYIQKSEWERHKSLQVVETVNPSVRLSLFLFTQNSQFFLTQKQISLMEKKFSISGPAQARPSNPCHLSLCGALGGQRRGCSGPSGGTRGPEGLSGLRRILTP

SEQ ID NO: 2753 - protein, 1220 aa, Homo sapiens
MPPAPQPADAAKGAKGGGVKPAGVPQVKLQGPCRTHPEWRVVQAPRRVLGDTRRPAVFLPHTLTVGTEPACHPPPTVPEHQVHGARSGVSWEGDRKSETSEEEERGWGSYKGGSQTLWSFGDSPQESAQQQAPWGTAIQLRGTLGGRGGGRFTSMDTVCSSPELPLEECPVNDAGQNVSFGTRHFPDIHHSPDSTHTVETAPSLNPLGSLCWCAPSAPAWTRLALLVGALCSHLNSTRSAGVRPLLPPGLNSLCCLSSKWLGAQDPAKDFALKPASAKVIDHLNFLTCPMPSLASVEMNKPQSTPPLCHVGQPSQAAVSLILTALGPVVTSYLPSLLPRYKILTGLSQAVCGPCCQEGYIFWGCPFPTGNPPCPPSCTGAPVLPVTAQVFGSPLPIPASRASYTAGRLPAQWRSRDVKMNEECGLPGASAYGIGLVSRSQGCKAEPPGPSPTGMTDGRHGPPPPQLSQPHGNDRQQTRASPSTAVLPSDQTYPGTRARGDLEPPHLQGQPPGPGQEQKERPRNYSTGMPPTDPRKGGLQVAALAPQWLCSQRQQRAVLLGPSWNSAWVWGLAGAEGEEWAAGQDDGSKDCQRMATVAEASEDQTLPESGRAAFPAGASRLSAPWWESHATHSQRAPTAKVWILIRIQECDVMSSSEAWIFAFTFECVNHGSPGSLEMCWHAWDLSWSEVEQLTLEAPHQALICQPPLPAGTTIGQDLSWMDLITPSPDTLYSQPQLSALCYSARNDDRDDYTPTREAPQQRVILASQSTELEAAPAVGTDWEPTKNSGRRKGSGAGGTRVVRLLTPELACFCSNLELRLASGGDAPHIRMQAHRPYNYHGHVRGPCRFHRSLKVGFIIVSFTSIFVFAESSLCTGDAQPIPSTAASILAGAPGDSLRQPCHWRESGEQRHSQGPQALPAGNWVQSVNRSLGPLQSRGWVAVGLEFAAAWPPYPLETCCPCPAIPPYLLPTIWFNPTMGSFRNSGSPAAHSPGKPPPAHHKGLHLPRLLMAPALGSEGGSHTPPWCAPPPGAQHIELNCKQHPMQLHEHQTFLSLKTCRRDKSGSALYDSHDRSSTANPATKQRVPQIKIPAGGSELQQDKGWAFWNNPAAGWGSEVLGENHNALLSAPATELSLLWSGESSSQALCGASIPGVSAGGPALAGIPHSHASSLRILPETQEQAAGPVPGAVGPMLAPQLRDRFRVPGCPPLSEECTPIVVKP

SEQ ID NO: 2754 - protein, 793 aa, Homo sapiens
MARELSQEALLDFLCQAGGRVTNAALLSHFKSFLRDPDASSSQHQHRRELFKGFVNSVAAVRQDPDGTKYVVLKRRYRDLLGEEGLQRPREPPAAAPSAGGAAPCSPRGARRGEPPQQQPRRRRREKEPEEEPAGAAARAADAACNGLPGSGSRRAPGKGGGSKGSPGQRPPVPAAAAAGAQARASCAAAKTQGRCCWECLQNNLAVLPGELGALPHSATAEEKPARALPAQDDRGASREREEGALAEPAPVPAVAHSPPATVEAATSRASPPALLPGPAPRGDRPELLTPSSLHYSTLQQQQQRTREWVARHPQVPEARDQGPIRAWSVLPDNFLQLPLEPGSTEPNSEPPDPCLSSHSLFPVVPDESWESWAGNTSLTVFRSIRCQLSLQDLDDFVDQESDGSEESSSGPKDSPGASEEGLQVVLGTPDRGKLRNPAGGLSVSRKEGSPSRSPQGLRNRGDGHISQQVPAGANGLAGHPLKPLPWPVPKLRRSLRRSSLAGRAKLSSSDEEYLDEGLLKRSRRPPRSRKPSKAGTAPSPRVDAGLSLKLAEVKAVVAERGWRHSLWVPSGEGSAALAPHRTSEHKSSLVPLDAREHEWIVKLASGSWIQVWTLFWEDPQLALHKDFLTGYTALHWIAKHGDLRALQDLVSGAKKAGIVLDVNVRSSCGYTPLHLAAIHGHQGVIKLLVQRLASRVNVRDSSGKKPWQYLTSNTSGEIWQLLGAPRGKPIFPVYPLVGSSSPTRKAKSKEISRSVTRKTSFAALLKSQHNKWKLANQYEKFHSPREREEYSD

SEQ ID NO: 2755 - protein, 308 aa, Homo sapiens
MGGADEVGCILQRALAKAEGFRLVHIQGRAADPALLQGLGQRLLIHQATPGCVHQEGPLSHLLDGEVVDEVVVVLVEAAVQGHAVAVEEQVLQGADTLQPQRPLHAIRQVRVVEEHVEAEGLGPQRHCLPHAPSPMMPKVSPRILAAPDATSRICSTLWTRVPSRSAWCSQVARRYRFRMWHSVESAVSSTDAAGTLQTAIPKSPADLMSMLSKPLPIRTMMRRALNFSRSSLVRVMVWYIRAPTASFRTFSWISCVDCASQKATVATSFRMGISTVQSRPSSNATRGRGCRGPFMIGGRTPQAAGPC

SEQ ID NO: 2756 - protein, 125 aa, Homo sapiens
MAAQPVSPPQKPSPAAPALLPGRGALGRPWVPGPRWRSGIPLHLTPHSRLCPPSGQTRSPWKRHFLHQSLPPSLPASPACAGSDWRPRCCLAVSQSLWVRLPGTLPQHHTEPWSQAAGEAPASQT

SEQ ID NO: 2757 - protein, 249 aa, Homo sapiens
MSSCITVWGRMMQQEKTLKQVMDSPAFLESKEHFPLWMLTVQARLGSRVRQFILCNYKNEQRAFKHVSKLQKASNLGIEFPISSDYRICAENLDIKKLDIKIMEIDIKQDTEFEETYRRKRSHWNLKNRMERIKAVLRVLSPELSIKGKNGTLKVFEIVQIKRKISSAESFYFTFSLPAGRKMGLQKRLLEVNENSLRNIKRFWMLQAAARGSESELRMLLEDEGISSYGGIWQPNHMVNFPLKTFAKC

SEQ ID NO: 2758 - protein, 792 aa, Homo sapiens
MLRSFLRGNHAAPALLSQAASACISKYSRFREYRGHEAQKNTKPMKQRILRAKIQISKRWILQMETLRELRQRRCEENKYESLPPGPGLQPSAPFRVESPIAAACSYSTIPVPRLSLHDLGSAPSQQRPRPPSPLSVCGSRPIFLSLGETPSCTLEHQHGEGRASTCLCALLDPVLGPSTRATVTRTADFRDTAVVKIKERKNEQKERCLQAFRDFKAILPVFFKRSSLAFPNISSINTLQHLHLQRFLYSDCPAIGAACYRNTANHVSHTIVKTLAHIGKTGVVHFMESILHLMNGFGYQHSPFIEWEEYWLSVSEVKSIKGDNLYGGSPTQSPADNEQTLHKGKPSYGKPNAYIANYFFLNLLQILTAAWRCMTTWEADPEGVRNQAGDNAAKELVLACVYLSCKTSLTQRGRATQIHTLAPRLRVWSVHVVCLSGYHRAQSSKHFTHRAQSSKHFTHRAQSSKHFTHRGQSSKRFTHRAQSCKHFTHRAQSSKRFTHRAQSSKRFTHRGQYSKRFTHRAQSSKRFTHRAQSCKRFTHRAQSCKRFTHRAQSSKRFTHRAQSSKRFTHRAQSCKRFTHRAQSCKRFTHRAQSCKRFTHRGQYSKRFTHRGQYSKRFTHRGQYSKRFTHRGQYSKRFTHRAQSSKRFTHRAQSSKRFTHRGQSCKHFPAHNKAHCGQVLGPVVSASELQVVVLALSVAGKLSCRYKEVVEYILASTTCFAGRVELSTVPWESEDRFTLWGHGKQNITVEAAPKPKTWDTKFTRLFCNHEKSNDGKMEPAHTPTLESPLALV

SEQ ID NO: 2759 - protein, 803 aa, Homo sapiens
MLSFSNITLVNIWSPDSRFACPPDAPGRRWALAPALTAQPEPRGQVHVPLLPCLHLGAPEFPKDTGIQSQPEHPIAKLGVSPTNWRHCLFEGVVYVTGIVSEELIASHPKTDSKYKEGNSQIPQIHQKKLSTAAPTVGCSPSEPRTGPIPRMAPRMAQLSTAAPAACRGVQDDVTRSPRSIQTVSINTPCLLQTRSHCVKSSAQGHCTGVVIQAKFVNMNEDYNFCHVRTNILHIKEKYSNKKTLKQHRKAFKFIVYWVQRGFRRLLRKEFVVGTRLGFRYTSKSYKEGLGVEKQKANYKEVLCGPEVSSTQWKNKCDSDSAGVARLQTAAIVAVEELDSTPPCWQHASLEMSLAESAEKRAAKLFWEKRHDWQFETSPGLSLSQAQSSSVCGKALYFMRAGANDSNPNLKGGFTPQYFTHLGCSTSKQACAIAVKTCLRSQDGPAHNAKGFAESLLCPRDAELSWKQALSTVLKRKHTSRQINSSTVGGCDSRRMGNGQKKPIANHHSFTGAGSDSHVSDPEDPGGTALINGLLHFLALSSVQPAGHPHRRQRRKLGVLPLAPATGWHASRGAGGRHHAAHAPGGTEADIMLPMLLVAQRPTSCCPCSWWHRGRHHAARAPDGTEADIMLPVLLMAQRPTSCCPCSWWHRGRHHAARAPGGTEADIMLPTGLLTVAQTGLHDGHTDRPPDGHTDRPAERSSYTDRFPQHGRHMERIVKPREISAQTSKLEMKHKTVPFRSVGGNLFGPAFRFWCHRLFNKDDSSSNHQRQGATSLNTSECTGLKEEFPKNIVSGELRLGRIF

SEQ ID NO: 2760 - protein, 41 aa, Homo sapiens
MCEQLGWPKGEIWGKQTFTILHWPHGTCRNEGVREDSGLLP

SEQ ID NO: 2761 - protein, 159 aa, Homo sapiens
MVLSEVMDAEDGVDLTITLQTHSFIIDIEILKIVHVDKKYNYFNSIEIPLKEEKDSEYASAGCVQKLELFLSEGYNFVTWALSTKPARTDSELYDCVYGQGTWEEFEAVVHGDPQMGRDFLETELQPKPRSLKKVLVAMEESFPQKPGQMFLEVSSQQK

SEQ ID NO: 2762 - protein, 234 aa, Homo sapiens
MGLWIEEVTDLPVSGAERHLKEGLYIAPPVKRQILKLRTFTEGRGSKRLNWNHLHIGRRNVMGLRFEKINFKAMTATSGWTSAGSGEAHAWPTGSLVQFCARHGEVFPLSSHNEGDSSPEVAKPMSSKGTVAQLHQVALSTDDSLIWLKRMMKNVMDEPFATVKLCMQSQCETNRTVLPSKEGNVMEALKLSGRLLLVNSMFFSIPFWGLTLISVPPDLTILIKKKVKSQGNVL

SEQ ID NO: 2763 - protein, 217 aa, Homo sapiens
MAAQCVRLARRSLPALALSLRPSPRLLCTATKQKNSGQNLEEDMGQSEQKADPPATEKTLLEEKVKLEEQLKETVEKYKRALADTENLRQRSQKLVEEAKLYGIQAFCKDLLEVADVLEKATQCVPKEEIKDDNPHLKNLYEGLVMTEVQIQKVFTKHGLLKLNPVGAKFDPYEHEALFHTPVEGKEPGTVALVSKVGYKLHGRTLRPALVGVVKEA

SEQ ID NO: 2764 - protein, 639 aa, Homo sapiens
MGMPPSEPPPRGPYVGPGVKLKVLKFREVARQAPRQKARGLDGFFLEDGALSLSSGHGEKWQRPEQKDIGQGPGAGQIYTPYHPPERILQKPQRPGSQTPANGLVDLGNLEEARQGDIESGSGVKSAFGGGLELRGPPGGKAPEDILHLLCPLKAQQTARGLQRVGKHWPCRFPGPSPASPGGGLDSCHLNRSPAIPLHPNIGELQALEVLDQPEPGLIWESDPGQPAQREFRHPELSLVATMGTKLRAPKLERVDIGRGDLCECLPSLLQSTPCITQSTRPGPGVTLSSAQHCQEGRRKEVRIKDGSSDPDDFFISIAPQRGLATVMCTNAEQIHNTVTYNWGSVNQPSDGPCHQSIEPASSQQRRGWQWKPDPKGKAHPSSSWAPEPLQQRQSYAEHWPMQDMAKVLLMNSFNLTTNLWGEEQFQADPTTDAAEGGRGGTQHYQENHCSLRTYYDARPIVRDLLDIHDGCDRHWNAHKDTAPSRAFSSSAVPTLPGCCQLPNARAATWGPGDTRAHTVVMCLDGECVRCQRYQARRPEGGRWEREEAPALPAPSLTRGLRKEQRVSWGQTHSIHAPAGSTHVRTSAPSAQAHWRSGPDLLRERETWMEKSDEQIPLDIPNPPFREPCEDARISPFYG

SEQ ID NO: 2765 - protein, 189 aa, Homo sapiens
MHFRITAPTQTPTRLCTCSGLQDREWVEGEEDIGVAPVKLSTARHCNKETFLIVQRGDSAGNHPPPIYSSEMCCRRVASSILQHFSTGEYGVKHREGPVAGVKQQIRELSSLAAECSKSQTQTISAIPEWPGKVLDSSHSGGHSKCLNEAATADVHRDGKEKNARNVFTICHEASTATSVLHSEKPARR

SEQ ID NO: 2766 - protein, 109 aa, Homo sapiens
MEYGFELMSCIGAKEGSVLASWLVESTHGHDAPNTLTQRQTQARVLDHDFLKSKFHQVQNSLLCIWCSILRVIRFCQSAGQDRRIKGRLSSSGGEDGTGEGELRTAQNE

SEQ ID NO: 2767 - protein, 627 aa, Homo sapiens
MKGRKDVDWNLLCLENNKKLDCGSAVSSPLLSWLLFTELKLEDKHIPYLRAVFSDADSEMKERSRGRWMMGREGEKAKQGTVVYEKFQKGDVGLILQENSRVRIMSPSFSQTRQWIRAFPLLCQSLANGCAGRMQPLRHFWFSGLQTMGQSSERVTRVTIDWQYVIPSFADEIHRKIRNSFAKALSGCVLIRRNNTQSGVRSRLSKGKVYDPSIHPAAGTPFKTGIIAIESRASSVGPPGDRLPKANDDLGQPARPPAAAVGDLRARPGLSAPHAHDHHRTRAPLLAASVYAGARGSGSRISVSCSTSFRGGLGSRGLAKWMAQGLAGMGGIQNKETLQSLNNHLASYLDRVRSLETKNQRLESNTREHLEKKGPQVRDWGHYFKTIEDLRAQIFANTVDNACIVLQIDNAYLAADGFRVKCETELAMCQSVENDIRGLCKLETDIEALREELLLMKENHEEEVKGLQAQLTSSGLTVKVDAPKSQDLAKIMADIQAQYDELAQKNQEELDKYWSQQIEESTTVVTTQSAQVEQLNRILLHLESELAQTQAEGQHQAQEYETMLNIKVKLEAESATCHRLLEDGKNFSLDDALDSSNSMQTIQKTTTRWIVDGRVVSETSDTKVLRH

SEQ ID NO: 2768 - protein, 382 aa, Homo sapiens
MYPEKIKGTSCGKKGPCFSIKSQQRTLSSSTDGKQREHGRGGAQTHWRSGCGRCSDGSEHTVITQKTVWHKEGKTAGEKGADGGNDIHVDEDCNKDEPELEKGTPEENDKKGLYLASYESESPENQTEKERWKALSLSPRGLGTSGATAGITVRREMPAPAPSPLAATAIPPMVPHPALPTSLSLQPQAMSGPSAVESHSVSDLAVLDLGPIWGTGRDRATSSRCLSQLRDSAWDGKQCGEVGAGLPQGLGRALGAKPQEFGGFQELVRAIVSPSSLPGTLSPWHPLGNMRKAPSRVRAAASGAGPISQKPFLAAAPSGPAQDGYQEDGQVPEPPVSPGVSGGPCTVSFMLKTKSATAQLPSCTCPGPLQALLGKAMPHTQP

SEQ ID NO: 2769 - protein, 141 aa, Homo sapiens
MCKTPHLDQGSRRKDFAKEKQGPRLGPGVLEGRKSPSTTTIGPGESLCSPGLEGTKKGSLQHEVPGVACAMHAKWHLSFNAEAGFIYQACALHCDLLRDRALHSRYSYHLVFAKSLKFLQQLFVPGETFTSYCSNKLIIAN

SEQ ID NO: 2770 - protein, 700 aa, Homo sapiens
MQANHGLVIVRGQRKQPLAVWSLHVTAVLSSVMVTHVDFILNFLPHNQVIPTITLSTEQEFGGSQLSTTVLNLTHMPIKQEAPSTPYTIPPRQVLEDRALQWLLFHSVSPPRSVHSENTFLIAYLFLKTNPSTCSNGLSKEKAAIHSHRLLKTDCVKDSNGQVSKTLQRYFVRTMLCSQLGFCSMETVKCLLSWGWLGLRKAVRDESCAGRELCWRPYISKNEEQVKVSGRVLHYIVSEHVEHNEGFERAEREKSLTNQILEHVQGGESFCFLWSYLAGMTEEVSVLVLLLDPGPIIARLSHCLQTEASQICLVSAVTFSVIIHVIPHIAPEFPEFSERASEQDVRKNSSACKLSLMLALTAPVGFYVTTSSLLWELKIFYVFFEMDPNSLQIHCEVDIDDETGGPTLLLTNYHYRPPKRKEEERESPDKAFPVFKKVKGSLNHSLVAEAAKRLQPTQERHIHYNQMDCGGSNEKPVPQVLFLAGEAPEACESKKGGYPSDRVARFWGTRERQVRPRPFKTLESVDVANQCLAGPKNPTTSGSRARALMSGAPQMSGAPQSNGLGSDSPIVPRSFKVLQEPQMLSLPHSSPTHLLAIHVVTGGPTPQSLHLKGFPDIDDLLLSNLVIALLPSCVSQRGCPCARQAPVCAPGPVSWPPQILVYVQVTRISGSQASSGACCRLDNLVDKTGSKFRSLIFMLV

SEQ ID NO: 2771 - protein, 417 aa, Homo sapiens [sequence omitted]

SEQ ID NO: 2772 - protein, 252 aa, Homo sapiens
MVSWIISRLVVLIFGTLYPAYSSYKAVKTKNVKEYVKWMMYWIVFAFFTTAETLTDIVLSWFPFYFELKIAFVIWLLSPYTKGSSVLYRKFVHPTLSNKEKEIDEYITQARDKSYETMMRVGKRGLNLAANAAVTAAAKGVLSEKLRSFSMQDLTLIRDEDALPLQRPDGRLRPSPGSLLDTIEDLGDDPALSLRSSTNPADSRTEASEDDMGDKAPKRAKPIKKAPKAEPLASKTLKTRPKKKTSGGGDSA

SEQ ID NO: 2773 - protein, 453 aa, Homo sapiens
MTHSLPNPSPWLNFPDPGSPGSPFQHNPHPSQLTYPHPLMNPLPFKDSSSPFLLQDYSWLLSYSFFRPKACAVSEPNSGPVARQNLSQSLCTSHRIYVCEATGLIVACYHGFVDTVVALAECPHVDVNWQDSEGNTALITAAQAVKDEGEQCGVNESKKHQRLAEGLAGTSTFCGSGNQYTCTLLFTGHAIITNYLLNYFPGLDLERRNAFGFTALMKAAMQGRTDCIRALMLAELRSLPGKLRGGCPREGPPPWDVAAGVGHLHGPRGCRPSHAEAAGAPLPGAVLGERLTDCVLSVLTPRSVRGPEDGGVLDHMVRMTTSLYSPAVAIVCQTVCPESPPSVGKRRLAVQEILAARAARGPQAQEEDERLRRRSVRPGVVVPRVRVSKAPAPTFQPERPARKGSTKDSGHLQIPKWRYKEAKEEKRKAEEAEKKRQAEAQKERRTAPWKKRT

SEQ ID NO: 2774 - protein, 512 aa, Homo sapiens
MKTIQAARAQRNGQCPPWTVPGQPQREAGEKVTLPMRCQRTSPSWMCWRPTAPQHSSSTSPCCSSAPLTPKPQSSPSSTCLGPQEELPVLAHSTASCEVFSLFQLQAYTRTALHIPFLLNVPQSRFSSFPSKGMTSHANPPRDGLWSTCGSPWTTGPQSRGSAIRGGLAAASLAIVSVSSRIRFLARYLDGLQAMENKEFEVPESLTLGTGRARREEVAVARLDAVVVYASLQVQRPVMVDGQGWHPWAGADTKIQLPPRQFDNQGQVDTRKATASVRGCQENPEIQERLSIAGTIKNQHQNQGAHMTRLFLYSIEKRGSFLIKLLPRLNECVSEILKVNSARSKDIQTKGERQSPKPECSPLASDPRDDAGSGGGSRFLIAQLICGKFLCHAGTFSATESGPNSQVGLRASLAALLAVELVAAHPVLGYQLAVHCESNTHMSPWPQALRHLVNLSVPTFLKGLLLQANTLLAHTVRREPWGCGHPAETAAHRNPLATSASISVHNIFRFLS

SEQ ID NO: 2775 - protein, 104 aa, Homo sapiens
MKSEGRCGDSSGKSVEKVKILLVGTFRAGPTAGGPSFMKVQYLSFAVDLDFKNDSLTTRVCDSLKLMQSVDVLHSEKGSLLKNTEVHFPLKALLNSQTHDDLSL

SEQ ID NO: 2776 - protein, 316 aa, Homo sapiens
MASLGLHMSAGQEWPPHFENVSHRCGTHCEEEGPTVGPSRKEADELRIGHSQKVDTPWAPSIPAGAFLNQATGITVNRTHGGSAACRGLVSVRSDYIYAIGYLQLLPSFIPQPYSDVLSDMVPPKEAQEDILERSNRGPSRPERCAEEAICEQKADTQNARCSMGNTSRDTHRGNLNENFRTMLTPATYPDVQKSVQTQKQINLVRISLLQGKISTHRCTVSYDEGSHATIWQTENRRMIRAKCWEGKQHPTTTKEGRKSERHDTAREKPQRQDIPTPGDTRQDRRERREDRQQGGSEREPAHGGAAADPLFLVSQ

SEQ ID NO: 2777 - protein, 74 aa, Homo sapiens
MGPISGICAAGPSSAASGGGRSGRQGWARRPASLEAAEAGEGAAKVAVRAPGRARAGWTPGPAAPRAPESYECR

SEQ ID NO: 2778 - protein, 136 aa, Homo sapiens
MKLKIGDRVEDNSIHRKDQEIKKALMLLVATCNLAALEGEAERERMTVGLVLLKWSLWPHCEKCTDGVLVDVRANGRGYKLWVKDGCFDKSGGCGEKILGNVEYSPRESPQGEHQDFVVNLELHILDGLLEDIIDP

SEQ ID NO: 2779 - protein, 279 aa, Homo sapiens
MHVIFYIWNSVKAFLIDILLLKCSGGSSFLSRPVLWCVLRISAGDSEKSPFSNPSKKLLTESRCEWAITASWSYQEPWSGIPILNGDSAAYQRPTLCELLESFQLHKNCKKNKQTNKKPLGLVHTIGKARSIRLQRDSSQSYLLKTFLLVGRKKGYSTIKRQIQKKDFSHVIENPYSKDENVIIKRLYNCRTIAISLFSASDLLNWKSSNPPFRDDPQKITNLFKAIFVYGEPTHPLRSTFNLKLLLALPVEHILTFFRTKFVWDTPLSFAFIKFIIVL

SEQ ID NO: 2780 - protein, 346 aa, Homo sapiens
MESLQGEKEQELQRKPWEPKDGGVKEHSGAGCGWRGLHSPERISNCSSSLFTAVKAFGISITRKAKLTGESYNDLLKGVECYRFRKGDACEGKDREQEPQLQPFHALAVSRDVPSQAYPLLIPKSEKEIRVPVSSREDELGRRSDVHLLYGLSGKASLFSPCLTTAFSSSDVPRVPFFQSSPKYFFQSTPNRRREGTEAGRCAGAQEVLTKPLQRNGSMMSFENVKEKSREGGPHAHTPEEELCFVVTHYPQVQTTLNLFFHIFKVLTQPLSLLWGCDQKPRTVPTLGNGAWDTCQQHIRTSSWTANTLVIQNQHSRESTVSVCLFMLIRMQHILKTDTLQQFRIC

SEQ ID NO: 2781 - protein, 212 aa, Homo sapiens
MPKLSLTVLAEVKHNYNFMDLPDASTQPHLAPPPPPPSPRPLQSPPPTRRLFSRADAASRLLAFPLRTKLPAGASASDRQRAGAWFLRRLPGGCRGCRDAGGLNTRMGQRRGSGLLGGSGGNLGSRTALFIGFSGTGRRDGECGRRSPLADRSSCSGDPQVGKLGQNAERSRLLRAVRCQGSTAERRGLREGRGRRAKWVHDMNCKIGDCVM

SEQ ID NO: 2782 - protein, 296 aa, Homo sapiens
MENRVTRRQKPAGLLQEMSSGDRGSFAAERDARDQDPESQDTNETPKNSSVRFLLPSHRWSELQCKTESQSLAAGDRRGLSVLSGAQGLRWAAGAEGAPGRSQEVLGSSTDPEMLKSNFVFLKFLGIVGLSSLVALPLSPPVGDVLPLVPSSHSFGEAQGRMACTGIPTLATLGETSDVWAPTVDSLPDGCVSLRAVKPTSVKVGSKALYGNRSKNQPEQLGVSFSSMWRLAAPSVLLGLEGLYTAPHSGSLVHPSSGELGKARKSGMRPRSVSLSLHAAADRKPQLPAAAAAECL

SEQ ID NO: 2783 - protein, 93 aa, Homo sapiens
MNEFLTQELAEDGYSGVEMRVTPTRTEIIVLATRTQNVLGEKGRRIRELTAVVQKRFGSPGRVSALQTPRRACCAEGLLWCVAVHHGNWGQRL

SEQ ID NO: 2784 - protein, 123 aa, Homo sapiens
MTTEPQKERTTWSLATRILFDMCSGGSCCVTFPKSLRIIAVKAQAVRFESLPTGLQCEGLILLIEQKHTVPATEASDAEAPCNSPLLLKQLLVWSSVVWSEKTDIFLSICDFNVFASSSSAAP

SEQ ID NO: 2785 - protein, 175 aa, Homo sapiens
MERKKERKELALMDQQGKEKGAGKAVVHVGIHKYGPSLKETGTQHPDAKKEAMTVTLLERVQLWLMGRWKGLLSCYTDVTENRPSLVLGELPVGWCYTLELAAKSADWCCASELAAKHLETSTVSGWRQNPKPHKGMKFPLTRCEEYPNRLLLLPSAAAIENYTKPSFCHKTSKI

SEQ ID NO: 2786 - protein, 298 aa, Homo sapiens
MSVDINTKEPTSLESKSNLGKVGERAIDKMDFLEAKENERDMISQVREMSQRTEDKIFELSQAKHQAGSNRNMNVKDRIVKLVLMVNGHEEKLRSLERPTFLAPAESLIIYIGYAHRATSSDLSERSPEPTCEMTEIGKSQDNTPHFALARGKKAVEWELLTLNMPSAAVPLPRMLAGQAGMTWAPEKNPGRAAEGEVVGCSEIDFCQCRSELRCSGHRASATLMHEASLQKPGVQTNGNPVCWIQTGIQSSGNIILALGSGKWGEDGFRGKKVQDNVMSKCQDFKQFETFPPSLVHI

SEQ ID NO: 2787 - protein, 93 aa, Homo sapiens
MAFRGSTSRGEGSKAQKTICECETNMQFTEGKKGKGLIYDTLICQSVELWGTATKVIVNSTGLMNRYSFPNFYCCTPQLSDCQANAKAQVPFE

SEQ ID NO: 2788 - protein, 300 aa, Homo sapiens
MPLGFQIQSLGTKLFQEDPEGLAGRGKGQAVPETGGARKCGAWVSTASEPTVSCAVDTSLRKTDKIRAPVGTAGERNEQVHCIRCRKVTDDSGGGEQGFLCLKTSMLGAPSPVEKPGALDRERRGRGGDNGKPLLDPGHSGPSAPWAPSRSSPRARRMGVLVGATLSDPQGSERDCDVSTLSRWQSRREDEGGTSCSSPHQAPHFLSPATVPCRDRRVLPGLRKAVLSGGCGPGGPGASAGSVAPTRRSQPGRTRVRSSGEAGVLGGARRTRRGRSRVKTETAYANCLRKSSAVEIRNHL

SEQ ID NO: 2789 - protein, 557 aa, Homo sapiens
MVGDQPCSIRGGLVTSLRAVPAQLKIHAAKLEAIVYIQDASLLLAKQRAKRSSVNEIKLWGKRLCLKSPEDSVHKGQGVGMSYRPCQWATSQGDISPLLLLLALACPWNGSHRFSAARVLWKARSLPQGEGSEAAEERWCRSPLTSTHPGPATKAQKENNVITVSERSTSKNGIRCDKWLGYGPGDISLPAPAENVFEPKYEFCITENCKKRNRNNYHLLSVYNVLVDLLTSNGYAPMQTFQKGKNECFTLTPVLGTKLQSSHSVTPPSFTPKTPTPSPQRPPLSPLFLDLHPGSSTRTLAPGPDCRGCQRKGRDQLIQGGQSEPRPSAELGFLVTAPRAQPLPVNYLPYVPFSQTRNRLLQVLGTESGASGAALDKGAWHPGAPPWPSQTQRAPTVQSFLHERGIEGRRQCTLLCPSERDAAAALSMGPQPAGSGEGMKWVVAQPVYEGRVPAEEWVPHAQRAPYQPSKAHREHLVVQSKGCWALKRAGGQVAVSSDWEPAGCRQTQALPGCRASASRIEAEACIHACNPSGPANIRLLLVFLRKSKERNNELALA

SEQ ID NO: 2790 - protein, 268 aa, Homo sapiens
MSGLVLGQRDEPAGHRLSQEEILGSTRVVSQGLEALRSEHQAVLQSLSQTIECLQQGGHEEGLVHEKARQLRRSMENIELGLSEAQDPRIPQGPSPPGKAKTLKRGKWVLSASLDEKNTMTKGVILRVMPSDKPLSPAKVLRGTDFNFGFSTSNSLSECSQADGCPKATDFMELCCKHVAACADREQALHVFLREGCAVCSEETDQPSPSPGRTPKTTGIHVQRMTHLRIRSVELHDFHSALTFVDADIVFTSICCLDIETIIDIYMA

SEQ ID NO: 2791 - protein, 127 aa, Homo sapiens
MPEVSSKGATISKKGFKKAVVKTQKKEGKKRKRTRKESYSIYIYKVLKQVHPDTGISSKAMSIMNSFVTDIFERIASEASRLAHYSKRSTISSREIQTAVRLLLPGELAKHAVSEGTKAVTKYTSSK

SEQ ID NO: 2792 - protein, 317 aa, Homo sapiens
MKGQWSIIFGLTFIEEMGTRQQEENQQLRSLDHRVWGSCYWDVMEHWGVFPPRESMRAHSLISLEDLDWLPLNQTFSQVSELVLNVTISTLTFLQQHGVAVTEPVYHLSMQNIVWDPQKVQYDLKSQFGFDDLHTEQILNSSAELKEIPTDTSLEKMVCSVLSSTSEDEAEKWGHVGGCHPKWSEAKNYLVHAVSWLRVYQQVLSPLSMFCSKVFVQWQQGSLLQKTLTGMGHSLEALRNQFEEESKPWKVVEALHTALLLLNDSLSADGPKDNHTFPKIDVLGPEVLALKAEIQFPIRAIKATGGWMQGASKDALK

SEQ ID NO: 2793 - protein, 76 aa, Homo sapiens
MALGHNRTSNQLGDLKLDDIFLKATDIVLKEVAEILSSVYLKSVFIGYFLVSFILGEDDNTMQKEKHDIINFDTKF

SEQ ID NO: 2794 - protein, 161 aa, Homo sapiens
MSNSMEISLICDNEFQCRHSQLECGYGLQSDRWTEYSIQTMGPDNLELIFDFFEEDLSEHIVQGDALPGCVGTACLLSSTIAESGKSAGILTLPIMSRNSRKTIGKVRVDYIIIKPLPGYSCDMKSSFSSIGSQEYHWMLAIEVWETLQLPSWLKKILLLL

SEQ ID NO: 2795 - protein, 163 aa, Homo sapiens
MPALPISRIQVRLGEHNVEVLEGNEQFINAAKIIRHPKYNSWTLDNDILLIKLSMPAIIVSFSGLIYTSTFFVLLLILTANYPDELQCLDTHVLTQADCEASYPGEITNNMFCGDSGGPVVCNGQLQGVVSWGYGCAQKNRPGVYTKVYNYVDWIKDTIAANS

SEQ ID NO: 2796 - protein, 114 aa, Homo sapiens [sequence omitted]

SEQ ID NO: 2797 - protein, 201 aa, Homo sapiens
MFSAFFDGFPVFTIDLKFAKIDYQTPERADKSPFPFLPSVHFSDFSASFEIVGDGDVDSIFSALSEELRKELAALRRRIPRGAAASDSNTKCRSGGRGKSPAARVPPYEYERLLTGSKVNPSTKLDLPLKYFTEVIIAVLMLQMKKDMRRKSKQFASQCTARKFWRQDLCTGMSGPRIHVLDPAISGVFAILHIPVTVHPH

SEQ ID NO: 2798 - protein, 585 aa, Homo sapiens
MTAAHAKALISYLELEEAPKLLLGSEAILANPQSAFLTCNISRDHHLSGSVKPPRRACKVNSSQKSVLWKNCSEMATQGHGYPHTQILKATLGYNSGNVQQGKIRVFQQKLEKRKYNAFTGQKYCGRGASIGTVGVKKMRSSTLQDPRRRDPQDDVYVDITDRLRFAILYSRPKSASNVHYFSIDNELEYENFSEDFGPLNLAMVYRYCCKINKKLKSITMLRKKIVHFTGSDQRKQANAAFLVGCYMVIYLGRTPEAAYRILIFGDTPYIPFRDAAYGSCNFYITLLDCFHAVKKAMQYGFLNFNSFNLDEYEHYEKAENGDLNWIIPDRFIAFCGPHSRARLESGYHQHSPETYIQYFKNHNVTTIIRLNKRMYDAKRFTDAGFDHHDLFFADGSTPTDAIVKRFLDICENAEGAIAVHCKAGLGRTGTLIACYIMKHYRMTAAETIAWVRICRPGLVIGPQQQFLVMKQTSLWLEGDYFRQRLKGQENGQHRAAFSKLLSGVDDISINGVENQDQQEPKPYSDDDEINGVTQGDRSRALKRRRQSKTNDILLPSPLAVLTFTLCSVVIWWIVCDYILPILLF

SEQ ID NO: 2799 - protein, 307 aa, Homo sapiens
MVFIVILRSVISGDTFACVLILAVFLSLQTEDNNTYVIQLLFTELKGTGYKVPQDVLQKLLESLQNHFQEDEQFLGAFMPRLGIGMDTCHSFETRDLYAMGVTECDNMLMLLGVSNKMTNREMDKVMPLIIQGFKDAAEEAETSVMGGQTVLNPWIVLGRVTTTVCQPSEFIMPDNAVPGDVLVLTKPLGTQGAVAVHQWLDIPKKWNNIKLVVTQEDVELAYEEVMMNMARLNRTGGLLICLPCEQTARFCAEIKSPKYGEDHQAWIIGIVEKGNHTARIIDKPLIIEIAPQVATQNVNPTPGATS

SEQ ID NO: 2800 - protein, 218 aa, Homo sapiens
MLISDGDEEEQEGVRGERDDVEDLGLYGNSECIEHLPGESYPRFQDQEKLCNQSVFISWSLWISPSRDSPLPSETPAFCSGGEAEKRERREGPGRGGLGARGCSPGSPVRRRSLSRAGPLCSGTDQGGGRHTARSFHPRAPTRTRAGSRYLQVAEPGAGLDSSSGRRLRRRRLRLRAPSRSARAPSGAATAELRSALGGCRKFVSEAECIAVGAEIIG

SEQ ID NO: 2801 - protein, 179 aa, Homo sapiens
MDEFSFSGNLLSLLAWKVKVSACVNVVTRTASLGPWKIAGASAWLLGAPTRAAPTRAAPACSLASPELEAGADEQENSICCWGKPASSRQDKNSPSVLCRTWLARAYQGRKAAQQQNLRPRLRPQRLFPLHQLHLVQLVRNWQFNFSVIGPTAVAQQNLCIPLAGGCLAAPYAYQPVRL

SEQ ID NO: 2802 - protein, 639 aa, Homo sapiens
MRQSPLYGLGPIAESVARLLGGSFWVLRQPGKAATQIVRLFAIQPQEGLSQTVVDSHAPAHGCQDPGHHTRGWSCGFERGSSLVRLLLLSSWRKPWFCFPSTPNCKVTLAAPDQKCNSEGPPKTGARRTLNPASQGRCEEENNPANTCDTSSNNRLTRSLFRSAINIIYSEHLKYLLSTPLIGLLDPPDTQALEGCKAGRTPRLTSTEKHTTGLEGSQFLDVIRTEAAFRKLGMVDPRLDRAGVTEVTGQGRCEKDGRQGRCLSNGRKYGCVSDTEQFPTPRTQITWDQRKETKGSTIFLEAKAMTFANSQLFEAFKPVPIMAHKPFLAPNQNHTLQSFKPLIRVQAYQTLKGSGTELLARAADPKPLVKSLGKSQGPGPGLHRCAKFPQDSCSMEALPWEPVNLELWVIKQRRHKPGPSLKRALGRAQNWIVLSASLIILVVTSELALCHNVFLEVTEPETHRLLQARSSPKALNKGGSQSRPAGVPWGPRPSWDRPDLHVNAPAHYTLAPSSTGACKTPTPFKAPPGHRVPQGAPGMPRGPPSSPESARSSRAPPPPAQRRPRAGSAPWAVGWAPASWSWPSDPCRREEPSQGPSAAPGSPRRRPPRPTRGDPALTGRLPPAIGWGYPATARGDGRG

SEQ ID NO: 2803 - protein, 18 aa, Homo sapiens
MAEPRAGQGPGALASAPS

SEQ ID NO: 2804 - protein, 204 aa, Homo sapiens
MSGPHFQKVWLGQLKETKINVAGRNLRLYGLVQLLKGLEDRQDAALSLSPKLTAQCYAISASLSSNQNTAITPTLDGTFGKNELSEETRGIHDHYLQCMDVWPLGSVFSLPELEITVAKFQGLTLAGSSSSLAGTDSTLYEDPIITQFCELFSAFAVSEKPSLNQQSRVEMNGCGSYKPSSTSSLHPFIQRILRSGRLVAGPES

SEQ ID NO: 2805 - protein, 461 aa, Homo sapiens
MQCERILKVKQVKSSSIETGSHPRIACFISTEALHCGVAVERSTNPSLALNFLGGTGCIFQIRSHHQLSAFPPRTRTSLSKRKQKDAQTLLQPKLPTQVHRPTRKRSLGREARGRRQLTGGTARQQLPPPPPKEPEPERAGPEASLAGATAAAATRRSTPLNNGQRANGTPTARGKWREPTGTGAADMIAVESKPDPQCQGLCKDEVPISTLTGTNKRTSENPYALATKNANVLSTREPPCCNSFQAKIPEKQNTKNTFYLHRLTFSNYREEEGSSRLSVFNSRSLTVGLAFKPETQWLRMVAKLPQPPPPPHHPAFQDSLKTNFKGTHDRFPTSESSPSPHIKGLQTSEYAENIHTTCPQLSCAQSALGTNQVPCEDAKVTVTRHEPFRSFQSTKKDDWCIHGYYIKLLGQQGNPGSVRPIPNTAIIITTAIHPVPVLHSSHNSIHQCLTFGLPNGYGSS

SEQ ID NO: 2806 - protein, 510 aa, Homo sapiens
MPQIAVPMGTILQKTIRLQESMREQRTVFERCKTGFSPRPCRQLHEHHPHPGQAKAKSATSTTSHLPLALQPVNLGEEEKGDCHYEFRDKVKSVFICMQLDTTACHLCGPFKFSLHILIATLSVGCYLKMKYNENYKIEKLNNDQCYKGQEGDHLMNASKEAILVMEVNCRATSQQNKFNGKTQKKLLRVPEIHVDILFNTGTGVGMLKIKKIGDEDFAFISKCKDPKVRTILLQGNGKETLSKMDHNIQDAVQVYCNFLFDPHLVPGDGASEMAVIHVLTEKSKLQTSRAAMETVVLLLWIDVITTGHKRKGKEQGQQGKTTGASKERKNDTGVDFFSESQKKTVNPSDFPSRQGALLGDKKEKEPSFANFGLCLCLLLGCQLLGGNTGLEQSSIGPYSGHGGATTEHVECSTLRYTTSLSTTGRERGGPYLGPAEECGRFSESTAGKDMHYPGQRVDSYFVSNDKVHLIDWCGHRENYRQGPLRLASIHDKLLMILKITTSSVSRVFN

SEQ ID NO: 2807 - protein, 179 aa, Homo sapiens
MHSLKKVTFEDVAIDFTQEEWAMMDTSKRKLYRDVMLENISHLVSLGYQISKAYIILQLEQGKELWREGRVFLQDQNPNRESALKKTHMISMHPITRKDASTSMTMENSLILEDPFECNDSGEDCTRSSTITQCLLTHSGKKPYVSKQCGKSLRNLLSTEPHKQIHTKGRNPTSNWMSG

SEQ ID NO: 2808 - protein, 1037 aa, Homo sapiens
MNGSVKRAVHMPSQAPTPCNLSRQPFKPQSLPPQRLARTQALARPFQEDVLRDKSFAGSIPQSGSAKTAGLTGFCKLCKTSSWHTGAAQILEGGMEKANSPQCADVRVSQRQHPSPSHAEGQSQSRALHQGWVLLQGNVITGQKASWKDRGFGVPQTTVCRTRSILHFLAHILASTTVYLGCLPCPGRQPKPAFLAPDPSVLAHIAPWVPTTSANETNANFLSLPDTVSPEIRLDHSPPVPDRSVSPLEHIPRTFPKPGTGLHTSTPSRMCSVSSSCSKDRPPTCAGSTFSKGRMGEHPTISHLRTAFIRSLPHKLQERYGRPTTFQRMAMSSCQLERSLPGKYLYLGRESFSLCSPAVLKWKSKKPDVGQNTLSQGAGSAGPQCESELARRKIPATWMHLYRSPRLTITFLIWFQPWMLLPGASIRDFRDSSELSPSNARFCLTTQKSLPRCLVLGKAQQAVEVDNQIPRRDFSLSPAGAVGQTHPGIIHKRSIKAWGGADFLGLLNGDLSLLILSVIGPGKPSKELSSFSRDLRENSPEFSVQVTQALNAVTWTGRRGCHHEQASQTASRSNPKTGQGGSDAAHGEEGCPCCLNGFRMKTALSPMWGSLTMNPIIKTSSAEQMVKHKNMWKEQRGQPHYPLKTIKVAALTEGYSSPAGPHLPSKPTCLPSGRPAKPHRKSWGRKAESEPQEASLATQPHPTHTGPVIQGPTFAGHRELTGTALRGCKELCLSVPLCRDGKRRAISGMEAICLLSTLAAQPEREEKQEDAGRVRSWVSAASPQSSRAGLGQAWRQGLPPYPTTGPSPVLGFCASPLQLQPQPLLFGRDVVLLPPGPAIPASGLASGFGAAGRAGHGWGALPAPGEEEGYGASGLSAELGRLSAGSTRSGQALHLLPTPARLHPDGLPAQGGEKRREAPRGWTSATATLSLLLPKKENPCNVDAPLQEPQADNNLPDLVSTLDAFTWDFRDSSELSPLNARFCLTTQKSLPRCLVLRKTQQVVEVDNQIPRRDFSLPPGGAVGQTHTGIIHKRSIKA

SEQ ID NO: 2809 - protein, 216 aa, Homo sapiens
MQVQRDSGCRLTRGQEEQTAGGPALGTPLPPEQDTVYLHSPRKDPEAWLSVCHTGLSGRTFCFYSEPLWERHVQAAGRAESLRAGGGIFILRDVGSEGAEARSSGKAPGGEVASCILMKLCCVVVEVPPTPAPQEAFSHLYVTPHSFGVRFGIGDAGPCHGSKGWGKGSSPGAGCIQTAVLLMAPMHFGSRLAEQLVGELCGATNCYPQALIGGGP

SEQ ID NO: 2810 - protein, 178 aa, Homo sapiens
MEALNTAQGARDFIYSLHSTERSCLLKELHRFESIAIAQEKLEAPPPTPGQLRYVFIHNAIPFIGFGFLDNAIMIVAGTHIEMSIGIILGISTMAAAALGNLVSDLAGLGLAGYVEALASRLGLSIPDLTPKQVDMWQTRLSTHLGKAVGVTIGCILGMFPLIFFGGGEEDEKLETKS

SEQ ID NO: 2811 - protein, 207 aa, Homo sapiens
MARESAACLGVSHRADSGHQAGSALPQDAATHFEVIGSHFPRRPAQEGFKLCAQGLKEEGAGPPQSNTWMPEFLSLRGSKLRFAQGATQDRSSEGAVGARSPVITPLQNAWRSHQPITQTGVTLPEKAVLKSSTLNPHPAAGALLRSTHAFPVQNAVLHQRERPYATGIFKATFHKSKHKEDLTHSYSVLQGRINPNNPYMINDSVV

SEQ ID NO: 2812 - protein, 210 aa, Homo sapiens
MVDTEVLLWMLKMVDFTAASCGDFLLDQQTLTPLLELIPTDDELHLACEMKIAKPLIESKLSGSTSSAQSTFAKMNDAVSVFHNLRGHNGLMGFKLWGKISLFISERGSKNCTVILLYDGETGGDSPMSLKLNHGRILEARVYCCPRQSGQFSYFCSFQGRTNSHPLTNILFSMRKRNQMLSKQCRFVCRRRLEAWVKPWVSLGDILGLS

SEQ ID NO: 2813 - protein, 470 aa, Homo sapiens
MTLARNPARVTQEAALQFLRCDIQIFHLEYSFQSKHKGIVQIDRHLAPVKVQNVSRGMDSRSSCRLRGWMDAAVRRGTGIAKVKRIKIKGEGFNCDVQIATSSTCSGKQSGQGLPTRYPSHRASILPWLAFLSAGRQAGQRRQWNQTAVRKGHTAMTPRGGAQVTLEEMEVSQRGSIWGEPQGAGAQSHSDWLQPPGRVGIQDTSWWTEQRQSSWSDGSGYVFTQPFRDVACLHCGNASGQPVPAVGARGQCSAREYSHRHVRADSGYSEEGPAARLGLGRLPGRGAARVFLKDELESAPGAGARCRERAELGGALQGHYLDPARWAPSADSEGSSTSPPGLQGGPDTFQEAVLDKGSRICRAGRGKGSVDNQMAFKPTEDGYILKRGNQHFIQIYLEPKWYKPSSEYRKNRKKLMLTSDIWICDEARGLCEDWHLLPREALSLVLSCDLNIGLEGERNGQRLGFASDAT

SEQ ID NO: 2814 - protein, 671 aa, Homo sapiens
MSAGATSVLCPLSLLCLLQTPATAIIFSQLDHFTVPTRAPCVHTAARDTRKGDWVIPPLSSSPVASHLHLETARPNTHGTPKNVCRSALLSASNDAGSEMQQEQVQPLAVREWTPLIPTHLVRPFALTGAISDDLQATCQSFSTLQPVGLPVSHTCPSLGWMMMAVPWQPLAAAVPDTPCSRPLSCPSYWTKHLLALETPAIFHGFCYGCSPMAPPSIMATIITPARPQTSSPIPNTALGGHLPPSHKPQEKEAPGRDGCRTFQKGHRAGVRGSDHLTLDRDGQWQNKPKLGEPASKHPSSSGHQSARKTLGTEGTPGYTQEMQLRETAALSSQRPQLTARLGAQEEALVLAFRGHQLRTSTPPQPLTLLNHGLSSLVSRGCFTPGSLGHSSHHGKAMGSTWPSSSTGFSWVHGPGGHSWRPFGVAPVYERARKVPKSCRGPAHLGLYRAHNGDTRQHPLERTTGNLNDTTLTPIRFSEDFRKCSAIRDTFILSTTVLFQRVHSLPGPHQGNNLQKAASDRNEPVDHEGQEKRRDIRKAQSQQLQQWGPPSTDQGGPGGLPDPTIWGRSAATRAASGMRASSPGRVNISPEPGGACAACGPAGAQRTKGSRRCPVPAARPAERARSHVPAPGLTGAGSRVHDFPEHSFTPWHRLSAYGCKALFRAENKQEF

SEQ ID NO: 2815 - protein, 358 aa, Homo sapiens
MAADHVQNEENYAQVLDKFGSNFLSRDNPDLGTAFVKFSTLTKELSTLLKNLVRHFIFVRANAVTSAEWQSNYWGRKMIEDDPSTCKIFCLLHPRSLYPYKATTPDLDCWEVLQPSLVLFSGLMLASTGKHGLVRGAWLDFRLPLYKPGVLEVPFVELCSALLSEARKNEALLTDCLSASWLLQQDRLQGLSHNVIFTLDSLLKGDLKGVKGDLKKPFDKAWKDYETKFTKIEKEKREHAKQHGMIRTEITGAEIAEEMEKERRLFQLQMCEYLIKVNEIKTKKGVDLLQNLIKYYHAQCNWNCDPQGEENEAQRDSADDSMSPFAFYGVTDTLLMTAMVILFFYNSSSFPAPISYQN

SEQ ID NO: 2816 - protein, 97 aa, Homo sapiens
MMKGTSSFGKHCNKTYTLCHHCGSKAYHLQKSTYGKCGYTAKRKRKYNWSTKAKRRNTTRTGQMRHLKIVYHRFRHGFREGTTPKPKRAAVAASSSS

SEQ ID NO: 2817 - protein, 167 aa, Homo sapiens
MAQRALEQLKSVGDDSGGAVLAGFLPTLGILWFQSPPFAKQLRYPYTGESPESPGLQCRIPVPLCVRKAARLYLSCTLSIESCAESPHPHLSENVSSGLKPAHKGFSSSSSSCLGHFLELCEYCGFSYISLEHKNRRFWFVTFETSGKSKPELILDAEAINPYCPLS

SEQ ID NO: 2818 - protein, 229 aa, Homo sapiens [sequence omitted]

SEQ ID NO: 2819 - protein, 251 aa, Homo sapiens
MLERELEELAFIEYLLPASVRSAHHSDLSISLRIVPDLKPAQATSNQQCLLNATTSVQALKPGASWDLKGARVQDGLSAEQDMMPSKLEGSLVLPHTPEIQTTRSDLQGHQAVPERSAFSPPRRNFSPIVDTDSLAAQGHVLTKISKENTRHPLPLRHNPFHSLFQQTLTDKSGPELKTPFVKEAFEETPKKHRECLVKDNQKYTFTIDRCAKDLFVAKQVGTKLSVNEPLSFSVESILKRPSSAITRVSQ

SEQ ID NO: 2820 - protein, 188 aa, Homo sapiens [sequence omitted]

SEQ ID NO: 2821 - protein, 1342 aa, Homo sapiens
MSCIQQDFSVNQMGARRRSREEAEKPQKLLSIIKSSAFQQGQQRTDSNSQPSLRAMPSHGLSEALPNKLQTISPAHHTLPNGIFLARKADSQGWLPLERSVRRILCADPCCQICNSVALEIQQLLVGENNQISLTLSGPLQGSSCLEMLSTSSMSLDQSLEFHSWHTRELSLSSVTPTLSQLTDQKSLTQSAAQSTYADGIQDYWADHLQLGQEFQVPDVLRGPNTIASSRIEKPRAPLNQEEMTQSNPSLVQGNQGQHHLNSQVSLLSLNPETLNRMHPMALHMVLPAHLPFLSPEVLRLLEVHVKKWMHFQRWGLPRRVEESLRQLMPNPPLYYQPGNDQPVSFNLKNTPQVSLHRFETISLQTWCSCVAGQPIQTFWVSEWSTMNPEQRHHCQQTPNPMALALPSPALKALSGPHPQSGGQDNDSGSDLQQKYSQLFCGLPSLHSESLVATFMGSQGLPKIENVPKPPLKDPFLFNELSFPQLLPKTSPQSAPPSSPLSPNWMSPSDHQRAQINVPFLTLAEYEALEWHLLQRQLQLQWGWPAALQRSQHTQCLMQHEPCGKAQSPETTTASQTGKSISVLTRELLFFPEHARKLLEFHIQKQLIRHRWGLPQKIQQSIQLLLTSTDQQTVSSSSTALANVSIPQPVALEANGACDVLSPIAAPVSIPRPHLLTQVKAILQSHIDSKCGQIHQGKIPACVHRSWDCRISGVLAVAPFPCIPESQFLELQTASDPDLHHKVMPWMPTALDQQQQALPGTVTEHPKLLRVLSVEAIEKLETTLRHKHLAFLSGLPALYYVALPRALAPAVTSQSVITEMEPSPVEIPAEPLIQMVSFEEQCISLGPCPQGNNESCTDVAKEFQPAVPVKGTMETLPLESQTHPTSPHSLQTHILTKLNFHLRKKVLEIQWGIPIRARKSREQTVAAPENISTQKSLESLNHQGETLLQELPIPPDTLPAPNPEGVHLKEQLANDLKAVQQNQKQSNSKAVPQGSAHSVSKISQPSGDMTEAHMPCVQVEANVNKPSLEEPCGPEPQSPSKSKDPAHVPMLAGNREDPEETKAARDHREGDAGFGRSSTREERRPAEDQRPAGMLPNKTPRGSWRWSRSFHLADPCQHSPQHHPQLKLPQLPPRVPGEKESEKDLQDSQTKLTVILEPATIPENAQTVLPQASQGQPFLSQPTQAKPLQGQTLQGQVLHGLVMPVHAQKKPSLTESSFRNKIKCFLQHINPKTKGKGHEDSMFSAAAKVAKTRKENVAKSLAPAKSPVGRSKTEKPTGCSKAQSRPAQKLVGPAFLDGPQSLDDKLRLHSRQPGSASALGYPRHCPRHCPREACANKPGHPT

SEQ ID NO: 2822 - protein, 184 aa, Homo sapiens
MSWAWAPVTMKGRHGCLLRRRMYVQGAGAAAREGFQEEVTSQAQVLVEAGLEAGHSRGPAGGHHGVEGQSEAILVGAIGEAFGKYMYLVLMSARKPSNPETDFEARSQVQTPATQSNPGPRKKNPVMSGMKVPRWPLRDGEASLPRALQRGLVFLNFWGPSCSFKGSRAIVERLQQPETSTTAL

SEQ ID NO: 2823 - protein, 570 aa, Homo sapiens
MDGYLPRNGPEPFHPTTDATSCTEIDCGTPPEVPDGYIIGNYTSSLGSQVRYACREGFFSVPEDTVSSCTGLGTWESPKLHCQEINCGNPPEMRHAILVGNHSSRLGGVARYVCQEGFESPGGKITSVCTEKGTWRESTLTCTEILTKINDVSLFNDTCVRWQINSRRINPKISYVISIKGQRLDPMESVREETVNLTTDSRTPEVCLALYPGTNYTVNISTAPPRRSMPAVIGFQTAEVDLLEDDGSFNISIFNETCLKLNRRSRKVGSEHMYQFTVLGQRWYLANFSHATSFNFTTREQVPVVCLDLYPTTDYTVNVTLLRSPKRHSVQITIATPPAVKQTISNISGFNETCLRWRSIKTADMEEMYLFHIWGQRWYQKEFAQEMTFNISSSSRDPEVCLDLRPGTNYNVSLRALSSELPVVISLTTQITEPPLPEVEFFTVHRGPLPRLRLRKAKEKNGPISSYQVLVLPLALQSTFSCDSEGASSFFSNASDADGYVAAELLAKDVPDDAMEIPIGDRLYYGEYYNAPLKRGSDYCIILRITSEWNKIRHSCCCRWRVLDWVPWLL

SEQ ID NO: 2824 - protein, 314 aa, Homo sapiens
MLSPPPSRRRRRGRQGPNRERTGYLSQPRPTGHHFRRLGVTTGYPGTRRNFWVTGGISYGDMRMLADGEDSDKSRQLDSITASFPLPHPWKNLKSADYQMGPQVKCLHTPWRGDDSSGRSDQPVEMRAEEHSKRDNICKDPVANRCMVHTRNLHKRGGAKQDRRYKGATYDTYLVHDFGQKDQGSELPLPSEQKVSHQLYLRPMPWGVEPPLSVESPPEPSALGPHIIHSSIIRHEDTEVGERRIPSLEELTDKEIDVFHAAEAGAGWREIREFTQDHVNVRARAELWLCRLEVKYITTLLLAFADSIFGLSAI

SEQ ID NO: 2825 - protein, 520 aa, Homo sapiens
MWLTCLCHCWMASWSTSMSLGQLSPAYLDQIPEMFADTRETETVFVPVIQAGMEALKAAECAGKLFLFHTSLPIAEAPGKLKNRDDRKLINTDKEKTLFQPQTGAYQTLAKECVAQGCCVDLFLFPNQYVDVATLSVVPQLTGGSVYKYASFQVENDQERFLSDLRRDVQKVVGFDAVMRVRTSTGIRAVDFFGAFYMSNTTDVELAGLDGDKTVTVEFKHDDRLNEESGALLQCALLYTSCAGQRRLRIHNLALNCCTQLADLYRNCETDTLINYMAKFAYRGVLNSPVKAVRDTLITQCAQILACYRKNCASPSSAGQLILPECMKLLPVYLNCVLKSDVLQPGAEVTTDDRAYVRQLVTSMDVTETNVFFYPRLLPLTKSPVESTTEPPAVRASEERLSNGDIYLLENGLNLFLWVGASVQQGVVQSLFSVSSFSQITSGLSVLPVLDNPLSKKVRGLIDSLRAQRSRYMKLTVVKQEDKMEMLFKHFLVEDKSLSGGASYVDFLCHMHKEIRQLLS

SEQ ID NO: 2826 - protein, 97 aa, Homo sapiens
MPSIVMATAVYHRDDVLNQGSGVEDVDLGEPLVGVLKASWFQSGQVPSPNTGLRPKTKIQGLRLTLALSPRLECSGVISAHSNLDLPGSSNSPASAA

SEQ ID NO: 2827 - protein, 291 aa, Homo sapiens
MGMGLKEPSESQCQGVVELERPVLSCHGAGWSHLKQREWEQHSLAWHLRLSLWLPWAMALPAVSIKPRQKTPTSQFNSGVPRRCPIARGKALPWPAGGTPQRCPILGDLPLKQPSGSPCGSTGSSEDPSSSRQEPLILPTNGIEAQSDRTAAQGHAWAEHKAAPLPCWNPSHWAGLCSALLTPTGLHSATNAYEGLPQLCYGSMHQEHNQNTAVFWAAEQARTGIHQVCLGKPRKNGQQWDHCWAQLQSKNDFRQDAVKGPEPSRDEGFAFVCLQISGWGIKNRTQECHPR

SEQ ID NO: 2828 - protein, 672 aa, Homo sapiens
MIEQHNQEYSQGKHSFTMAMNAFGDMTNEEFRQVMNGFQYQKHRKGKQFQERLLLEIPTSVDWREKGYMTPVKDQGQCGSCWAFSATGALEGQMFWKTGKLISLNEQNLVDCSGPQGNEGCNGDFMDNPFRYVQENGGLDSEASYPYEGKVKTCRYNPKYSAANDTGFVDIPSREKDLAKAVATVGPISVAVGASHVFFQFYKKGIYFEPRCDPEGLDHAMLVVGYSYEGADSDNNKYWLVKNSWGKNWGMDGYIKMAKDRRNNCGIATAASYPTVLSPKAQLQSLQITPESKFLRQLWGSARGLVVAAVVVPFPIAQSVLEEDVAETLLHKLEVPGGAPMGRLGKTGALGTEAFHCCPSGGPKCGLRGGPGEYECSQADGKCNRKRSGQTSENVGELPQRWKPGTRDSWCLTEGAHHHSPRPRAFPQGALRRARFQREAGRPQPLPAPVAAVDGRETRSARAKGGDPTAFALMASFLVLPKNKAKGDQKPGTLAFSRLSPDVSLYSSCLKLGPTNGRQRPKFNPVKPAPANKAHGWRPRDSSGPALRLSPDLYGFRGSLEGQNHIPAAVSFDALRKLQRPKLFPEKRSFTGVPALSIDFTNGCDLVGSSSLHNMLVCSSYDINRQDTFQKDRKITDQRPPLAGEPGRAAGEIGVLPHCRSSQGLREGTGNW

SEQ ID NO: 2829 - protein, 103 aa, Homo sapiens [sequence omitted]

SEQ ID NO: 2830 - protein, 294 aa, Homo sapiens
MMEVLKNNNREIDHGQSLEPSRERRWAPEAEEDVEGNGEWVKYIDDGDHPRAVAIAKLRRRRVWRGCQFLRVTIEERVEMEFRSRSHRSECDIVLKRPSFQILLLGVADGVIVTLEMHLVGRERVSDTRKRISDQSSQMFTATNGLRSQREREGPQDGTGQPGEKTNFLTQSLAELDTLCLSHRTTSYCMEVDEKVNREQATPKSRAPKAPAGQHFSIISNISIGVPEKAGTSVLNPQTTIWSRMVYQVEEDVDVIYDGFENSDSSEFGELTSKAARYLSRESAGKLSVGLVSQ

SEQ ID NO: 2831 - protein, 137 aa, Homo sapiens
MMIDLAEVADLVLMLIDASFGFEMEMFEFLNICQAHGFPKILGVLTHLDSFKHNKQLKKTKKRLKHRFWTEVYQVAKLFYLSGMVHGEYQNQEIHNLGHFITVMKFRPLMANFSPLYPGRQDGRFDKPGGYPNKHQM

SEQ ID NO: 2832 - protein, 239 aa, Homo sapiens
MGPAKTSASLGNQEALPTRRHMAGAEKSHEGCSLVSANDKHSTTGGQRPRPVDLRSEKHRTEKHQNTETLKQRNTETEKHQTEKHRNRETPNRETPKQRKGSAPDSGLPRPMRHCLALKPVTIPAVGRRIDRQALQPQASRVTELEAVWLLPGAGTGASGILEVQLQAVGPLSPSRCREAQELVTVQEVLTPRAGNGAQQEPAGPDGHRRKDSKRWDGGLGEGAAGGTEPGPSGQGGHR

SEQ ID NO: 2833 - protein, 39 aa, Homo sapiens
MARKLRSASWKGWFTLRAGVKAESTGPSNKCPALVSGPI

SEQ ID NO: 2834 - protein, 239 aa, Homo sapiens
MHSTSEKLLLSAILAIIFCGICCHKYMKVNISEQSATTMHYTMKMLASGTNTIFISLGISTMNLLIWTWNMAFILLHWPSPSCTEPWCHPVLTPVLLLDDAAGDHRPGLHGAMAFILVVLPDRNKVKEKNLFVSTTVIVFFTVIFRGLPIKSLVQWLKVKRSEHQEPKLHEKLHHHAFNHILLAIKDISRHIRHNYLREMWSHFDRKFLSGVLMRRLTQKSRDEILNVFHELNLKDVIS

SEQ ID NO: 2835 - protein, 424 aa, Homo sapiens
MEDWENSKAFQQGLSQTYSSAPFNAALLNPERKAAFTRTLQAESVSWTRALYPAHGRTPQARVRVKTVGEAAAAAAVLPLTRRWGIAQTPSVTEKRRPGETVQFWAAPIPLQALPLNVPAPRGQPCGVSEPPASLAGCYAAWREGERSSGRGGPTCFVVRGHRGATVGGSRNSGRLAGCDLDRRCPIGPRNREAGCLSLPHDSLALESRQPPEFRSRSPRRGMKSGAGQRRGSAPQSRSPTGSLGARGEQSAQAGPSHSRPARRLPPAAAAPLAARGRASRGVGDLASGGRGAATGPAYHVTVRGAPGSHLPPGHRAAGARNRPGSWRDRPPPPRPPIGLWAPDSGHRSAPASASPWGIGVLYRPLACPEDRFSPGPEANCGEIETTELRWRRVPAFPQRRKLARESSSVIQRERCSGCLPVLT

SEQ ID NO: 2836 - protein, 597 aa, Homo sapiens
MECPEMNCEEGWALAKCGGKNYEQAKACFEKALEVGPENPEFSTGYVITAYCLDGFNTTDSNETFSLHPLKWAVSLNPKDAHIKVILALKLQDEGQEAEGEKHTEKALIKQRPTFAMVYVDLANSEESDGKLIEDSLIQLRCHFTWKLLIEAPEIPDLENRIWEEIQFLDTKYNVGIHNLLAYVKHLKGQNEEALVSLKKAEDLIQKEHANQADIRSLVTWGNFAWVYYHMGRLAEAQTYLDKVENTCKKFANPSRYRMECPEVDCEEGWALAKCGGKNYERAKTCFEKALEGNPENPEFNTGYAITVYRLDKFNTASGRNKAFSLHVLKRAVRLNPDDVYIRVLLALKLQDEGQEAEGEKYIEEALTSISSQAYVFQYAAKFYRRKGSVDKALELLKMALETTPTSAFLHHQMGLCYRAQMIQIKEATNWQPRGQDRETVDRLVQLAICKFEKTIMLKRTFEMAYVDLAETYAEIGHHRKAEEHFQKGLRMKIFEDQLKQEIHYHYGRFQEHHGKSQDKAITHYLKGLKIEKMSHSREKLLNALEKLAKRCIHQNVRVVESVSLLGLIHKLKGEVSDALLCYERALRLAADLNPIF

SEQ ID NO: 2837 - protein, 168 aa, Homo sapiens
MEAEDRGAPLCVYALYLPPSGTSPGSFIKGLRQLCSSPAAAPLALRKDIRNRQPRLIVARLRGREMSPDTAAAALASREPTRHGLGAPPAAAVAPLRLPFFSSYHSPAHLRLSGESSNGIASVSVLCCVADLGALEGKSWHFGEEGLALSRRLLQLSCCLDLRTSNLK

SEQ ID NO: 2838 - protein, 134 aa, Homo sapiens
MPQMPLPVSSWESPLFLPLLAYATLCTAVDKGMPSLAGLPSPGSPPTRALRASAGSTGQGRRLSGSLWYDELVCKQRAHLLNIRGHFPLREGPGAGLQFQAQRSSLLPQELAQSPSALCPISSMQKDIEPHGTM

SEQ ID NO: 2839 - protein, 264 aa, Homo sapiens
MKDQESYVFLPLNRERVMSEIIFNAGYMDCKATASYALEAEGDKARSNNDSGNIILSDQARNFRRIPHYVMSEEENIKPAILVTWTLATVIIQVSPACLIVLQCLQDEVQMALFQYGSLDVVILILHLITVLDDCQKSLLSYSAPQLLQSAIFFRDLPDFASLLLTAKNFKPFAVAAKREAFDVKVSGLNCGAALGSVLLLSQAPLQLAVMLHSTMMSNRRCKENRDLKVQRLFQQDRGNRGSGQMCSGDCQSVSQCPHLEVTN

SEQ ID NO: 2840 - protein, 172 aa, Homo sapiens
MASSQVASSEVPTPLQLAALAHSPYRPVLWAAHVLSTLAALRCPQELGLGPGDTGHLGAGRQEATGETRPVDTGLLPPAPGQHPGVERASGLCSEGFSVCFHHVSHSAQDKSTKLTSLLSFRRCEAQEGSSAGLTAKRGYASCRQVQSNDGIMGFNALGFSRDLSFIPNKTN

SEQ ID NO: 2841 - protein, 297 aa, Homo sapiens
MDLKLFMKEFSASRQASLKVTSPVAAMHWGIQGMKETRRRVKTGTAHASPLPPRPCASSRTGSTDARQAGDGVSGTRLRVRPWSLKGGFWLRESTVMWFCGFPCQGDVRMCQIPTPLAITALLLRIFSALGFAFQKAKTTSTVVEGTPHTLGGGGTKRNTFATPLKGEKQQGESTGVRSSAPSGGEGSTAMAEVSGQCPTPITRGRGLSAEWVVTAGTAGAYNYSGNVGSQGQAEVAEPESRCRGPVNPTRSNLVGTLKASSKQPCEKPAMMRTPQGHPGKLHSEKTGDIPSVGLEQ

SEQ ID NO: 2842 - protein, 397 aa, Homo sapiens
MAANKPKSCSSSIVATTGKRIFPVIEPSGSRAHPRARELSDQLAWTGGRGAVNGRLHQNSLLEKISSKKWGASRKQQLISTSVQHCTEVDEGFSVHVCKTKSPAVVEGFPNAEPLLNLNIPRDELSLSQELPLWSLPQPSDSSPRCTLKTEELLVSWAANSRQHLTFQPEQAEWRLSAEPQLDVDSSWPPRGKDRETQTHLLRAEGAVGSGELGAPCQGFLPQIELLEGPTDFLWAFRHLFAFPLAFLPYPQKEIFRGSSVVLPLQVLSEALQRDSSWVGRGGCGCFPVSVNNGRNLGKCLGEHLLPVGAFRSPPGLVPSSPTAEETEAGSRDSILGLTQLEEDGSKRRVTGSLVVIGNMGRRVHGKVARAWHRCLRLRFAQVHACTHRQGSLASSF

SEQ ID NO: 2843 - protein, 1137 aa, Homo sapiens [sequence omitted]

SEQ ID NO: 2844 - protein, 113 aa, Homo sapiens
MDKILEAVVTSSYPVSVKQGLVRRVLEAARQPLEREQCLALLALGARLYVGGAEELPRRVGCQLLHVAGRHHPDVFAEFFSARRVLRLLQGGAGPPGPRALACVQLGLQLLPE

SEQ ID NO: 2845 - protein, 241 aa, Homo sapiens
MSPLLGLRSELQDTCTSLGLMLSVVLLMGLARVVARQQLHRPVAHAFVLEFLATFQLCCCTHELQLLSEQHPAHPTWTLTLVYFFSLVHGLTLVGTSSNPCGVMMQMMLGGMSPETGAVRLLAQLVSALCSRYCTSALWSLGLTQYHVSERSFACKNPIRVDLLKAVITEAVCSFLFHSALLHFQEVRTKLRIHLLAALITFLVYAGLSFSPNTWHFQSLYDMRLYIVDDFDVQLFPSMAA

SEQ ID NO: 2846 - protein, 148 aa, Homo sapiens
MIRVSYLGDDGIQRADSDTGELGVVLPESTESLKGDGGVRATSSSRSGLAAAASGPAAGLSRAASPAACAPAAGCAPPVTSMAGRGWISAKVVMVVGNWISLGIRCPLASGTWQRRNGPVYLRDLIGRMVANYTLSPIRRIRNRCFES

SEQ ID NO: 2847 - protein, 238 aa, Homo sapiens
MAKVGIARNIQFEYMKQDSNDMDKTEAGGDANLIDIYPLSKGRSFWQICVVGNKAQWNAHVVHSLKTQKWKSCKVKPQVQRHTAEATQDTGLPPLESAARLRHLEPQKDLEGVDSWEKILLSSLAGTMDTFQSLDKSASFITSTNAQEFKGILQSDWGRELQSIPAAWLDSGGAQNLIQNLSRMDQPHLGKWHLLSQIMSFSAADTAGSEAAEKMLHTSVVTSAAVHMAIKETGNNAP

SEQ ID NO: 2848 - protein, 638 aa, Homo sapiens
MGKIENNERVILNVGGTRHETYRSTLKTLPGTRLALLASSEPPGDCLTTAGDKLQPSPPPLSPPPRAPPLSPGPGGCFEGGAGNCSSRGGRASDHPGGGREFFFDRHPGVFAYVLNYYRTGKLHCPADVCGPLFEEELAFWGIDETDVEPCCWMTYRQHRDAEEALDIFETPDLIGGDPGDDEDLAAKRLGIEDAAGLGGPDGKSGRWRRLQPRMWALFEDPYSSRAARFIAFASLFFILVSITTFCLETHEAFNIVKNKTEPVINGTSVVLQYEIETDPALTYVEGVCVVWFTFEFLVRIVFSPNKLEFIKNLLNIIDFVAILPFYLEVGLSGLSSKAAKDVLGFLRVVRFVRILRIFKLTRHFVGLRVLGHTLRASTNEFLLLIIFLALGVLIFATMIYYAERVGAQPNDPSASEHTQFKNIPIGFWWAVVTMTTLGYGDMYPQTWSGMLVGALCALAGVLTIAMPVPVIVNNFGMYYSLAMAKQKLPRKRKKHIPPAPQASSPTFCKTELNMACNSTQSDTCLGKDNRLLEHNRSVLSGDDSTGSEPPLSPPERLPIRRSSTRDKNRRGETCFLLTTGDYTCASDGGIRKGYEKSRSLNNIAGLAGNALRLSPVTSPYNSPCPLRRSRSPIPSIL

SEQ ID NO: 2849 - protein, 252 aa, Homo sapiens
MESNGIFTTLAKAGAHLERGTKRFIISIPSADVPMFVMGMNHKHENKLTVISNASCTTNCLDPLAKVIHDNFGIREGLMTTVHSIIATQKTVDGPSRKLWHDSHGAFQNTIPASTGAAKHQKGGEAGTQGPLKGILGYTEHQVVPLEFKSNTRPSTFEAGAGIAVNDHFVKLISWYGNEFAYSNKDEQLQKTKANRAAEEAFVNDIDQFFPGTEWESVAWLCNFNPKSRRQAKDISQRCSVLISLKQAPLVH

SEQ ID NO: 2850 - protein, 1204 aa, Homo sapiens
MGLMEYKTGKRIIDEEGVESINDMFHENAMLQTENNNLRVRIKAMQETVDALRSRITQLVSDQANHVLARAGEGNEEISNMIHSYIKEIEDLRAKLLESEAVNENLRKNLTRATARAPYFSGSSTFSPTILSSDKETIEIIDLAKKDLEKLKRKEKRKKKSVAGKEDNTDTDQEKKEEKGVSERENNELEVEESQEVSDHEDEEEEEEEEEDDIDGGESSDESDSESDEKANYQADLANITCEIAIKQKLIDELENSQKRLQTLKKQYEEKLMMLQHKIRDTQLERDQVLQNLGSVESYSEEKAKKVRSEYEKKLQAMNKELQRLQAAQKEHARLLKNQSQYEKQLKKLQQDVMEMKKTKVRLMKQMKEEQEKARLTESRRNREIAQLKKDQRKRDHQLRLLEAQKRNQEVVLRRKTEEVTALRRQVRPMSDKVAGKVTRKLSSSDAPAQDTGSSAAAVETDASRTGAQQKMRIPVARVQALPTPATNGNRKKYQRKGLTGRVFISKTARMKWQLLERRVTDIIMQKMTISNMEADMNRLLKQREELTKRREKLSKRREKIVKENGEGDKNVANINEEMESLTANIDYINDSISDCQANIMQMEEAKEEGETLDVTAVINACTLTEARYLLDHFLSMGINKGLQAAQKEAQIKVLEGRLKQTEITSATQNQLLFHMLKEKAELNPELDALLGHALQDLDSVPLENVEDSTDEDAPLNSPGSEGSTLSSDLMKLCGEVKPKNKARRRTTTQMELLYADSSELASDTSTGDASLPGPLTPVAEGQEIGMNTETSGTSAREKELSPPPGLPSKIGSISRQSSLSEKKIPEPSPVTRRKAYEKAEKSKAKEQKQGIINPFPASKGIRAFPLQCIHIAEGHTKAVLCVDSTDDLLFTGSKDRTCKVWNLVTGQEIMSLGGHPNNVVSVKYCNYTSLVFTVSTSYIKVWDIRDSAKCIRTLTSSGQVTLGDACSASTSRTVAIPSGENQINQIALNPTGTFLYAASGNAVRMWDLKRFQSTGKLTGHLGPVMCLTVDQISSGQDLIITGSKDHYIKMFDVTEGALGTVSPTHNFEPPHYDGIEALTIQGDNLFSGSRDNGIKKWDLTQKDLLQQVPNAHKDWVCALGVVPDHPVLLSGCRGGILKVWNMDTFMPVGEMKGHDSPINAICVNSTHIFTAADDRTVRIWKARNLQDGQISDTGDLGEDIASN

SEQ ID NO: 2851 - protein, 243 aa, Homo sapiens
MSNGQTEENTELRSQHWATAVRVLLVGTKQVVLGADDKLSKEVSFILNVERGFVSITMFPRGEGEKASVSQCPQFGRANCSSFRGQNKLQDTESFIAVQWLGPNNHKPVVTASGALNSSVHIRYSGGTDSPGAAALEDERGGAESPGEREPARKSEPDSERRERHHARLEEEYPYLLAGRGAGERKVLWNRIGFRMQGLHGLWETAGAEVKRRSVGSVYGCRSVLPPQILACVLPNVDPARTP

SEQ ID NO: 2852 - protein, 193 aa, Homo sapiens
MSTVDQWTGGKGTGLLTGQQVLPEGPRKLHRHPTLQSLLAENHGQASTPSEKPSETSIAVTFLKVLGRAKEMEMIQQLEPSTFGPAGCASDCGARMLLFHFGLLQLLDSLYAVTCVLWPCSNRIAIDALMLSVASHVIMLTVLLEDDAICHTLKATVWLWNSGRVKTRHGAARIKRLLSPAFLPWRHDTPSAL

SEQ ID NO: 2853 - protein, 106 aa, Homo sapiens
MKKLWWIRVGPVQFSTFTMKKKSWKVTELCMWEFGCRLAGRAIGITALMARSTGDEGGAKEPARGRKAWKPWPTTHHLSVFSSFLAPRKMKSMCLMSCLQSWMRSV

SEQ ID NO: 2854 - protein, 143 aa, Homo sapiens
MDWANVPPLLESGDLGGKGRTGWLEEPPPCKGPGGRLRRRQAQSSNMHLPQLQGRSGACQFTPPHDLMAVCARHWLREQHLTEKILGWATGQNWAKTLERGTWLKATPHFHVIFQWHQLSWTDVLTELHMPQSSLVARVSSVH

SEQ ID NO: 2855 - protein, 427 aa, Homo sapiens
MTLRRLRKLQQKEEAAATPDPAARTPDSEVAPAAPVPTPGPPAAAATPGPPADELYAALEDYHPAELYRALAVSGGTLPRRKEPLARGTETAPGKLKVREPPVGEAGRWLRRVRSHSEEVRGEPLTPDSTPFRGDSPIPGLGACRLAPRLTFGGGLAKAQNRKALGCAGSKEKGCSGTGPPPRTKKLGRGSGFRWKNLSQSPEQQRKVLTLEKEDNQTFGFEIQTYGLHHREEQRVEMVTFVCRVHESSPAQLAGLTPGDTIASVNGLNVEGIRHREIVDIIKASGNVLRLETLYGTSIRKAELEARLQYLKQTLYEKWGEYRSLMVQEQRLVHGLVVKDPSIYDTLESVRSCLYGAGLLPGSLPFGPLLAVPGRPRGGARRARGDADDAALCGPGLRKTKYRSFRRRLLKFIPGLNRSLEEEESQL

SEQ ID NO: 2856 - protein, 476 aa, Homo sapiens
MKILLVPKELCAFGEEPISMRFSTDYGFPRQLKRHSQGLKELMGQPWRRLKYKHNVFALCHFGGIHFKAGTSDVLRNKGLLVLLSSGSVGKRKKHILKAWRRKVIPQIKPKPRAALLKEIAAQDVEKEKETHSYLSKEEIKEKVHKYNLAVTDKLKMTLASTALCHTEACRESAYRREKPQGLGIGKRADSGARNSNGIYTGFIKVQMELCKPPQTSPNSGKLSPSSNGCMNTLHISSTNTVGEVIEALLKKFLVTESPAKFALYKRCHREDQVYACKLSDREHPLYLRLVAGPRTDTLSFVLREHEIGEWEAFSLPELQNFLRILDKEEDEQLQNLKRRYTAYRQKLEEALQESIHVNRKAQESRNSEEFIVKDFVRGLTEKAKCKFGRRHVRWWRVLRAMEGDLAFQLGVVEKGVVACKRVKSIQCGGVKPILGSLGFLVGRIWEQSQRQELNQKEGPMNSAADQSENQAGVAY

SEQ ID NO: 2857 - protein, 207 aa, Homo sapiens
MSVMDGSGNNSDDHRRKYLNIPSICRVLSSSGKHKKISGRNKYTKESEQRAERENIAFLVKYGNSWHQSAKLNINSLFCAIFKSLVDGVWDVRVEQMEENGPQDKNLQVLSDGEGGPLFDKPLLVFPRICKEYMNINSSVSLSFGEGIRLAGIDCDNREKKQWYSAPGKVGMTPHPRQVFCGHCKMQKRTSILLKLHMKNEVKEDRE

SEQ ID NO: 2858 - protein, 458 aa, Homo sapiens
MGQRGRAPLTEPHFACSDPLSASLYSAPTLTAREGDAGRWTRICPHLSPSPGDPSTVPDPRERGRETCAHGGFRDRGPAVAAPVPSAGRRPEARLAPTCSPASRWRQHLAMLLQLLRAGASLIALASLPRCQSAVTIQGHREPKSGACQSNQKICLLRKSQSPAALGSARGRLLSSPDARGALSSLDCKNQGGLAAITALIPSLICLLLRPTKDFSSRLTSSLPLTHTHTHTSSVPSLPPSLLFSGERQLDRMIHLQESSLGHALLEFPGSRRYRVSNVAELLGSSGQEGGEALSSADVPPPDARVPPSRCPCSHCSQIGPRWCPRGDLAPSTRIHLAATPGQLQPLNPASKCCGQSPTQPTRCPSRHRGLEGRETRRCPPGSSALAPSPPRRCEFQHRTQASRCRLCHFAKGGRGERKERGEGAEETNPDHRRRKKPFSKQSLLSASHPRCYTVKRH

SEQ ID NO: 2859 - protein, 1398 aa, Homo sapiens
  VARIANT 731, 732, 733, 734, 735, 736, 737, 738, 739, 740, 741, 742,743, 744, 745, 746, 747, 748, 749, 750, 751, 752, 753, 754,755, 756, 757, 758, 759, 760, 761, 762, 763, 764, 765, 766,767, 768, 769, 770, 771, 772, 773, 774, 775, 776, 777: Xaa = Any Amino Acid
  VARIANT 778, 779, 780, 781, 782, 783, 784, 785, 786, 787, 788, 789,790, 791, 792, 793, 794: Xaa = Any Amino Acid
MAYSWQTDPNPNESHEKQYEHQEFLFVNQPHSSSQVSLGFDQIVDEISGKIPHYESEIDENTFFVPTAPKWDSTGHSLNEAHQISLNEFTSKSRELSWHQVSKAPAIGFSPSVLPKPQNTNKECSWGSPIGKHHGADDSRFSILAPSFTSLDKINLEKELENENHNYHIGFESSIPPTNSSFSSDFMPKEENKRSGHVNIVEPSLMLLKGSLQPGMWESTWQKNIESIGCSIQLVEVPQSSNTSLASFCNKVKKIRERYHAADVNFNSGKIWSTTTAFPYQLFSKTKFNIHIFIDNSTQPLHFMPCANYLVKDLIAEILHFCTNDQLLPKDHILSVCGSEEFLQNDHCLGSHKMFQKDKSVIQLHLQKSREAPGKLSRKHEEDHSQFYLNQLLEFMHIWKVSRQCLLTLIRKYDFHLKYLLKTQENVYNIIEEVKKICSVLGCVETKQITDAVNELSLILQRKGENFYQSSETSAKGLIEKVTTELSTSIYQLINVYCNSFYADFQPVNVPRCTSYLNPGLPSHLSFTVYAAHNIPETWVHRINFPLEIKSLPRESMLTVKLFGIACATNNANLLAWTCLPLFPKEKSILGSMLFSMTLQSEPPVEMITPGVWDVSQPSPVTLQIDFPATGWEYMKPDSEENRSNLEEPLKECIKHIARLSQKQTPLLLSEEKKRYLWFYRFYCNNENCSLPLVLGSAPGWDERTVSEMHTILRRWTFSQPLEALGLLTSXXXXXXXXXXXXXXXXXXXXXXXXXXXXXXXXXXXXXXXXXXXXXXXXXXXXXXXXXXXXXXXXLLKNAENEAYFKSWYQKLLAALQFCAGKALNDEFSKEQKLIKILGDIGERVKSASDHQRQEVLKKEIGRLEEFFQDVNTCHLPLNPALCIKGIDHDACSYFTSNALPLKITFINANPMGKNISIIFKAGDDLRQDMLVLQLIQVMDNIWLQEGLDMQMIIYRCLSTGKDQGLVQMVPDAVTLAKIHRHSGLIGPLKENTIKKWFSQHNHLKADYEKALRNFFYSCAGWCVVTFILGVCDRHNDNIMLTKSGHMFHIDFGKFLGHAQTFGGIKRDRAPFIFTSEMEYFITEGGKNPQHFQDFVELCCRAYNIIRKHSQLLLNLLEMMLYAGLPELSGIQDLKYVYNNLRPQDTDLEATSHFTKKIKESLECFPVKLNNLIHTLAQMSAISPAKSTSQTFPQESCLLSTTRSIERATILGFSKKSSNLYLIQVTHSNNETSLTEKSFEQFSKLHSQLQKQFASLTLPEFPHWWHLPFTNSDHRRFRDLNHYMEQILNVSHEVTNSDCVLSFFLSEAVQQTVEESSPVYLGNEKFPDKKPKVQLVISYEDVKLTILVKHMKNIHLPDGSAPSAHVEFYLLPYPSEVRRRKTKSVPKCTDPTYNESSI

SEQ ID NO: 2860 - protein, 650 aa, Homo sapiens
MSLVALLKDSANILLYGKTNMYCHLGSIYYSFYEIIIPKRLTVQGGDSPVEGLSYLLLMQGQKHLVHLKVKRNHFVNNFPVYSYHNGLLGQESPFISHDCHYEGYIEGVSQGHILLIKEEKSYSIEPMDSSRRFEHVLYTMAHQAWQQGSRKPHDLQALSYLWSHKKYVEMFVVVNNQRFQMWGSNVNETVQTVVDVIALANSFTRGINTEVVLAGMEIWTEGDLIDVTVDLQITLRNFNHWRQEMLFHRAKHDVAHMIVGHHPGQNMGQAFLSGACSSGFAAAVESFHHEDVLLFAALMAHELGHNLGIQHDHSACFCKDKHFCLMHENITKESGFSSCSSDYFYQFLREHKGACLFNKPRPRGRKRRDSACGNGVVEDTEQCDCGSLCQHHACCDENCILKAKAECSDGPCCHKCKFHRKGYPCCPSSRSCDLPEFCNGTSALCPNNRHKQDGSKCHTIYECLKVHCMDPNNQCLQLYGYGAKSASQECYNSMNSKGDQFGNCGISTSPGSQYVRCSDGNIFCGKLICSGITGLPKINLQHTMIQVPQGDGSCWSMDAYMSTDIPDEGDVHNGTYCAPNKVCLNSACTDKTPVISACNPEKTCNGKGVCNDLGHCHCNEGHAPPDCVTAGSGGSVDSGPPGMSDGNSS

SEQ ID NO: 2861 - protein, 146 aa, Homo sapiens
MPTPRVGPGQPSLLFGLSQLSNPTGGGVLRGPGSGPNPLCKPWAVAEGRSSAKGGRLGANLPWKYMEMLPDLSSHPSQDSESFSDPEEYQGGNGKFNAHSFLDVQKPNEVLLSLSSLSGALIEPHSQPHRKDLEALSTDDAVVPQK

SEQ ID NO: 2862 - protein, 109 aa, Homo sapiens
MLSAAARQRVYLCPKGQAGGPGEQKGAQSCWRRWGVEIIIMSEIIIAVNAQRLGCSAEAGGGLQRLLTGRTGGVDPAECLALRAAGLATRFSDTTPENGTEIIACSRNV

SEQ ID NO: 2863 - protein, 221 aa, Homo sapiens
MKKRLSVIGILLLTASLSLGSHMWNATDLYAVLNHPIYQRALWQVYLTTASGSIQPQIYNSGIGHESSRTIPRSGSASSRAYGLAHKKPCSLEKHSHYQPLFQSSKIVMVAPIPGPLARKTRLLLEFCCPCNLAEDSSSDETGCIQGGMDKDPYGHQRQLLSIIENPDVPKAVFWPSGDHVERPLVWDVDDINSNIEFDPVHVCDLIQQCAFTILYSSSIA

SEQ ID NO: 2864 - protein, 181 aa, Homo sapiens
MPTPLLPLWANSTGALSGRLVVPQCVWAVSYTLVFALHSRRIPLIPAHAFESAFGGRWRQHPWLGKGSLPTDSDTLFMENHGALWKGVVKGRSSEYKKARKTSAQAIERETGMSEFEGLGVKHFQLASRGLMKEKPAVGGEAQGVFLQDTRKVVYKEAEKAGDGFRACGSGPSGGREESEG

SEQ ID NO: 2865 - protein, 205 aa, Homo sapiens
MGLVITEVEQEPSFSDIESLVVWCMAVGISYISVYDHQGIFKRNNSRLMDGILKQQQELLGLDCSKCSPEFANSNDKDDQVLNCHLAVKVLLPEDGKADIVRAAQDFCQASESRAFGLQAEQRGQQRGGSVAQLAGSRRTPGRPGARRLSSHRSGLPRPSRLLSHPHGGRAAERGVRIAKLLPPRPPRAQAARAASTAGGPRAWA

SEQ ID NO: 2866 - protein, 121 aa, Homo sapiens
MEFVKGMKMVSGKRKGEEEHEQKDDNVRKCLSRFEIAVLLRRLKARIGEVEIISSDMLVEASMGKTNSGLEEDAKRVLGLYGNTDQGPESRRLPWLFRQVCFPADVCTGRWVPNCSESSQS

SEQ ID NO: 2867 - protein, 152 aa, Homo sapiens
MEASLRAAPRTISSQGSINQSGSQNHFRSRNHHSERLPEPFPVTEAALRAAPRTISGHGSGTQSGSQNHFPSRKRHSERLPEPFPVTEAALRAAPRTISRHGSGTQSGSQNHFRSRKRHSERLPEPFPVTETALRAAPRTISGHGSVTQSRF

SEQ ID NO: 2868 - protein, 287 aa, Homo sapiens
MRPPACWWLLAPPALLALLTCSLAFGLASEDTKKEVKQSQDLEKSGISRKNDIDLKGIVFVIQSQSNSFHAKRAEQLKKSILKQAADLTQELPSVLLLHQLAKQEGAWTILPLLPQYVFSVTYSRNSSWIFFCEEETRIQIPKLLETLRRYDPSKEWFLGKALHDEEATIIHHYAFSENPTVFKYPDFAAGWALSIPLVNKLTKRLKSESLKSDFTIDLKHEIALYIWDKGGGPPLTPVPEFCTNDVDFYCATTFHSFLPLCRKPVKKKDIFVAVKTCKKFHGDRIN

SEQ ID NO: 2869 - protein, 731 aa, Homo sapiens
MHHPPRAGQAEGQQGKGDRKPKWPPPKPPPSFAIRNSDSSCQGGPSPIQASELRASKSQVLGASAGGGPIKLKPPLGTSRGCWSPAQQQRRPRHLGQGEKSPHSSQATAHGKEQLIKPPRQRAGLQPRAAAVSGADNRSRKGPPARQQPSQVLLSRTFPRLVQPIRAGGKERARCSSLETGWPHLAAPWRRRSQGQPGSVAAPTSSPPRGAAAGTEDLRWSPPSAYPLPGSSGPSPPCSSHHSDFQRPDHPAWLPPGTRESPADSHSPQQHKLRFHGPDEQAEADTTKARGQWFTSLKLKSSPKCPSSTPGTPKKQERQDEHKDVPSTHHMLNHRESRRQHRLSREEKAQGQAPFSDQERQSPGAPTGAGRQCPPPLRPQTGHQSSESLCKLPACIVPGTMVPAPSKAGRPTGWKSRRTPPLQAPAPGAGAWGTQRAPTQFPMGGHCLSLSQELHQLRVAVAAPAASAGRVALLWAGPGAFGSRAAAAWVLVGPGGPGRAYRGLRSAQRDAAADHGRGAGRARQALPATLALRGRRGYVIRPRGAPMARPSRSEVRRACECREERGGSGVRKRKGTAPPPAAPLLRDTHSLYPVPPPTHATQKHAAVGSTGPAPLASHTRNFSASTAAALREAQAHIPYPQNTGCTRLESPRGLTISQGPRPPTSPILARRKAHPNRTTERAQRDPQSAPPLQDPDCAATRGLPCPDPDSLRAGRFGLAAGHDDFTFRVRS

SEQ ID NO: 2870 - protein, 165 aa, Homo sapiens
MDGMTWEIVASLKLIGSWQPKNPVLQMARKLPRKPLENMVKDGETRMTPWFLKRCLGIEVRLMRLHTVPFRRADTHEIINHGSLAGRQTQSWRRRPQTRWAERRQHRDLREALGRNRQRWGLDSPGERKLLGGDQGLAFGPKPRTRDQLVPGNSGAQHPTTGAGA

SEQ ID NO: 2871 - protein, 1077 aa, Homo sapiens
MSHLGLPLGLSHLPTAPRGRVPGICPPSWALPCKDGGRNSGRKQRTEWSGENPAPRLLLGLLRCSVARCFRQKLLHQGRARRLPPPRAQGPPALSPSAAAGRGQDSRALGCKVLEYPTITGHPEWAGKEGDDGGGMEFPEHGGRLLGRLRQQRELGFLCDCTVLVGDARFPAHRAVLAACSVYFHLFYRDRPAGSRDTVRLNGDIVTAPAFGRLLDFMYEGRLDLRSLPVEDVLAAASYLHMYDIVKVCKGRLQEKDRSLDPGNPAPGAEPAQPPCPWPVWTADLCPAARKAKLPPFGVKAALPPRASGPPPCQVPEESDQALDLSLKSGPRQERVHPPCVLQTPLCSQRQPGAQPLVKDERDSLSEQEESSSSRSPHSPPKPPPVPAAKGLVVGLQPLPLSGEGSRELELGAGRLASEDELGPGGPLCICPLCSKLFPSSHVLQLHLSAHFRERDSTRARLSPDGVAPTCPLCGKTFSCTYTLKRHERTHSGEKPYTCVQCGKSFQYSHNLSRHTVVHTREKPHACRWCERRFTQSGDLYRHVRKFHCGLVKSLLVNYSHVRKVVGVRPNGALGGNRTLLGSGSRNPCQEGLGHKALQGVISPEPSLAGARPSFPDQMGQGLYMCCKRQHSALLTCEEPGADRGVGQSRSPLCLFSWTLSCPRCCPMHCSPAEVRLHHQQVGKEGPALQRLTPSSSLRGSRPTPVSPIFSQGCSFGHPISFISHPTRAPHSWVCGLSQVISRGRGSPGMRTDRPTAEYSHNRILCVDEREELAVHPMLMKLPELMERSLLQDCPLSLAPPVHLPALLGLRATAVSSGSGGAVGSLVLSLSGHSHRSRPSAPGLPCPGRLLVAAGGLLVRLLRAGAGSWASPPSHRGLLLPPAFSELMPRPDGRDKGLLPNVGCPDERGDDAHHLGYFRMWEPMRAAGTKLSPASSSHWRLPAGTGGKGVMSQAEHSTGRPMEVHGTAHVCTLRPVLGDCPSLRERISNPKRKKPQRHFPQKSELCWISPKRFLCRDLWPAELPSPAVSSAVSGPTWPEGISAPVFGKQTHVPQRTGSQDCHSCDPTLPEWERKIPP

SEQ ID NO: 2872 - protein, 31 aa, Homo sapiens
MAIVNSTCRYLRACAARVPALGRGHSEVTHG

SEQ ID NO: 2873 - protein, 1427 aa, Homo sapiens
MAEEEEGTTGELRSAEPAPADSRHPLTYRKTTNFALDKFLDPARPYKCTVCKESFTQKNILLVHYNSVSHLHKMKKAAIDPSAPARGEAGAPPTTTAATDKPFKCTVCRVSYNQSSTLEIHMRSVLHQTRSRGTKTDSKIEGPERSQEEPKEGETEGEVGTEKKGPDTSGFISGLPFLSPPPPPLDLHRFPAPLFTPPVLPPFPLVPESLLKLQQQQLLLPFYLHDLKVGPKLTLAGPAPVLSLPAATPPPPPQPPKAELAEREWERPPMAKEGNEAGPSSPPDPLPNEAARTAAKALLENFGFELVIQYNEGKQAVPPPPTPPPPEALGGGDKLACGACGKLFSNMLILKTHEEHVHRRFLPFEALSRYAAQFRKSYDSLYPPLAEPPKPPDGSLDSPVPHLGPPFLVPEPEAGGTRAPEERSRAGGHWPIEEEESSRGNLPPLVPAGRRFSRTKFTEFQTQALQSFFETSAYPKDGEVERLASLLGLASRVVVVWFQNARQKARKNACEGGSMPTGGGTGGASGCRRCHATFSCVFELVRHLKKCYDDQTLEEEEEEAERGEEEEEVEEEEVEEEQGLEPPAGPEGPLPEPPDGEELSQAEATKAGGKEPEEKATPSPSPAHTCDQCAISFSSQDLLTSHRRLHFLPSLQPSAPPQLLDLPLLVFGERNPLVAATSPMPGPPLKRKHEDGSLSPTGSEAGGGGEGEPPRDKRLRTTILPEQLEILYRWYMQDSNPTRKMLDCISEEVGLKKRVVQVWFQNTRARERKGQFRSTPGGVPSPAVKPPATATPASLPKFNLLLGKVDDGTGREAPKREAPAFPYPTATLASGPQPFLPPGKEATTPTPEPPLPLLPPPPPSEEEGPEEPPKASPESEACSLSAGDLSDSSASSLAEPESPGAGGTSGGPGGGTGVPDGMGQRRYRTQMSSLQLKIMKACYEAYRTPTMQECEVLGEEIGLPKRVIQVWFQNARAKEKKAKLQGTAAGSTGGSSEGLLAAQRTDCPYCDVKYDFYVSCRGHLFSRQHLAKLKEAVRAQLKSESKCYDLAPAPEAPPALKAPPATTPASMPLGAAPTLPRLAPVLLSGPALAQPPLGNLAPFNSGPAASSGLLGLATSVLPTTTVVQTAGPGRPLPQRPMPDQTNTSTAGTTDPVPGPPTEPLGDKVSSERKPVAGPTSSSNDALKNLKALKTTVPALLGGQFLPFPLPPAGGTAPPAVFGPQLQGAYFQQLYGMKKGLFPMNPMIPQTLIGLLPNALLQPPPQPPEPTATAPPKPPELPAPGEGEAGEVDELLTGSTGISTVDVTHRYLCRQCKMAFDGEAPATAHQRSFCFFGRGSGGSMPPPLRVPICTYHCLACEVLLSGREALASHLRSSAHRRKAAPPQGGPPISITNAATAASAAVAFAKEEARLPHTDSNPKTTTTSTLLAL

SEQ ID NO: 2874 - protein, 1096 aa, Homo sapiens
MESVQVWEQWPETAQLQCVGGGPSVRSPPVWVESQPDRLDSSTLDTGLCIMTLTVPHIWLPPPRYYLMSSSAGSQTGVLRSGDAACSFLAVAASSSIHPHAQTRAQEPPGQLRPYRQRLNQFLAPAGAVLLIMCGKDGQSQARPLSPGAPVSKAPDALVHTKPSVYCLLHAREGSKSGSHLVHGTSVLDQTLHQGPRLRNCDSALPWLLARLRGGSLHPGWHLLLNRERSREIQGFAETAREGDNLSLSSVTLAWAQTLSPLPVPAHTLAVLAQALPEKSPSPLLWSPDVVRVCGVSGELFPGPMDLEASVALLTTLQSFCWASPCATGPRPRLQGQQSQAAPTHPKALLMQLPPARIPLGGTMSCGCGRGAAFPQALWAWRETLGRKGPLFPVLEPGHLRSELTRRPPGGAREELPGPVTPPDFCSQTPEARGAKPGSFYSLMMSRSRAGKHERDELCVWEPLTSVYPDADSGPINTDRGPAKSTTPHHALVNRRQVTREMRVSSQGCACIFTVCCMPGSSLGIRCRQDFGLCLLLHPALSPPTVEDPVSPAPSPFHVSPQALVHVFTEAKEREKPPWKERAVPGQQRGGEEKAIWDGCGLLKAEQPQKSRSTVCASRDTALGHHHVDIFLILWAVRLDSPTQCTPFLEGVGHLHTLLSLEDGMRFQRAETERRHGEPQGEPSICQLGFKGFYDADLGDRAQRERSLEGKRGRRAPPGWHGGCSCSRNGGCRDLADTCLVVGPDQPREQFHSVRAQHTPAPGFWGAKWVLLIQGCTAAAPALPERPPLALLGLTPRLGLTFSVEREDVTSASNRTLHTCAERQKDVHLKSDSMCPHTLAHAYTQRMPSHTAPCGSQAPDNLGRQISIADRSVSQNSSTGGPRRTELQNRRVCANRGVCANRGVCENRGVCAACPRHPKAFPLHFVLWIQSSLWKDDGKICLLGPQISRSKFQLPRGHNTGFSEPPHPNFISPHCPHPTNPRELHMVNGMSGTLPPKQHPPDVSAPALWTLVAATCDQGGQGGLPGPPWSTRRRPLPSPRPEKVADGASLKDVLEHEPALTGDGGGRSGPIAFTLVATVTLHEALLGQQTEWKILF

SEQ ID NO: 2875 - protein, 1079 aa, Homo sapiens
MATLVQSLGGGFGPSTAGLSTSGSSQSPIGKGTYKVLIIDPTQDTTTPQRMHASIGTQMCSPQLSAGDQGIRKGLSFRLPGAKHLAEGHFPGASGPDAILPPGPCHPGGDPMTQNQAAQQIASTGSLTVGLPPQDATLPATPLQVEEPLQEPLGAPEPLCPPHVACHPKGLTRALSLSGALPCMRASVEGIFLGYDFQGSHSSGEPIPGGHSGQLLRKLLWLKADACDPTQPAHGHYPSRIHSPMLVTAREAAGQKSSLKDTGEIGGSERRCQNAPPPGQPPPRTGITGTQMGSPQLSAGDQCRRAWVRCPGCAIQQAPGAPPLLTLAPLHDSGPQRKPWAGSKVTNQLTANQGCWPGCQHCCQSGSPTTCPCLERMPAQDPSPSTHQKSQPGPRARCFVCPTPWPNRPPISRDGEPLSDPCGTREPLLSHSFVLGSPQGQTLTPSVSWELPCMRLKEPFPDWTTVTPAGLQGRHRLGSDFPGSCPPRGQTHLSTGQYKVLIINPTQGITLHCPTTHASSGTQMGSPQLSAADQGARKGLSFSSPGAEPRASGPNASLPLGSPSGGGGGASRQQAAALYWVEGTLCCLGLHYPCRVSGKASFLGSINKEAALPEKPSISGGDSGQYKVLIIDPTQGTPSIPTHASIGTRMCSPQLRAGDQGARKSLSFTTPRAGHQTDDHSPRDSGPNESFLPVSPSGGQELPHMTPGLYWPLGVSQGHLPSHGQPRRLTWMPRTAANLAVAQPAPVCGGQAPRPCSTPHRKSQPGDPGPRDPIARKQPGQVLPQQAFSPQEDTLSATCPQGSHRTMEGQGRQVPGLRQDTRAVLLQASLAHAGSLMTQAALGPLGRRQGHQPAHSEPRTLARMPRTTANLAAAQPALCMEEQYKVLIIDPTQCIPLPAHVSRGTQMCSPQLSAGDQDARKGLSFSSPGVEHMAERHWPGASGPNARLPLGSPSGGDAILLATPLWGGVTFSGTQTAPLAQSPNSQGQPAAPPGLSSDSEIEHGSESSAYHTPQRAVSSAVPAAAKPLFNGVGPSPLRLICVSRMQPGMPLQKPAKDGFFWGNRKSLKLQKVGKNKEEA

SEQ ID NO: 2876 - protein, 163 aa, Homo sapiens
MPMSCKWLSNCLSPVALSLWEASTACQWYVNAIASVAVFSHKTVNTVKQIPLWCLTTGVQCKADGRAAPGNSGDRHQAWDGMDKGRLQEEEHGGDAGDHFADIGGIHGSENSKQSAYGHVVSKHLKLIAAYEEVQISGICSCPRQGTQRERAVWQAKGMLKRQ

SEQ ID NO: 2877 - protein, 690 aa, Homo sapiens [sequence omitted]

SEQ ID NO: 2878 - protein, 390 aa, Homo sapiens
MIIQSLLSPLNLEVDPNIQAMHTQEKEHIKSLNNKFASFIDKVQFLEQQNKMLETKWSLVQQQKKARSNVDHQFESYINNLWQQLETLGQDKLKLEAGLGNMQGLDDEINERAEMENEFVLLKKDVDEAYINKVQLESGLEALTDEINFLRQLYEEEIQELPSQISHTPVVLSMDNSRCLDTDSIITEVKAQYEEIANRSRAEAESMHQSKHEELQTLAGKHGDDLQCTKTEISEMNWNISRLQAEIEGLKDRRASLEAAMVDAEQRGELAVKDANAKLSELEAALRQAKQDMVRQLPEYQELMNAGPGHGNPTYRKLLEGEESRLASGMQNMSIQTKTTSGYADVLSSGYGGLTACAPALALAGGSSSFSRTSSMVVKKMETRDGKLVS

SEQ ID NO: 2879 - protein, 525 aa, Homo sapiens [sequence omitted]

SEQ ID NO: 2880 - protein, 855 aa, Homo sapiens
MKYFLRPTVCIQVCPFSLRVVSVVGITYLLPQEEQPLCHPIVERALKSCGPGGTAHVKLVVEWDKETRDFLFVNTEDEYIPDAESVRLQRERHHQPQTCTLSQCFQLYTKEERLAPDDAWRCPHCKQLQQGSITLSLWTLPDVLIIHLKRFRQEGDRRMKLQNMVKFPLTGLDMTPHVVKRSQSSWSLPSHWSPWRRPYGLGRDPEDYIYDLYAVCNHHGTMQGGHYTAYCKNSVDGLWYCFDDSDVQQLSEDEVCTQTAYILFYQRRTAIPSWSANSSVAGSTSSSLCEHWVSRLPGSKPASVTSAASSRRTSLASLSESVEMTGERSEDDGGFSTRPFVRSVQRQSLSSRSSVTSPLAVNENCMRPSWSLSAKLQMRSNSPSRFSGDSPIHSSASTLEKIGEAADDKVSISCFGSLRNLSSSYQEPSDSHSLREHKAVGRAPLAVMEGVFKDESDTRRLNSSVVDTQSKHSAQGDRLPPLSGPFDNNNQIAYVDQSDSVDSSPVKEVKAPSHPGSLAKKPESTTKRSPSSKGTSEPEKSLRKGRPALASQESSLSSTSPSSPLPVKVSLKPSRSRSKADSSSRGSGRHSSPAPAQPKKESSPKSQDSVSSPSPQKQKSASALTYTASSTSAKKASGPATRSPFPPGKSRTSDHSLSREGSRQSLGSDRASATSTSKPNSPRVSQARAGEGRGAGKHVRSSSMASLRSPSTSIKSGLKRDSKSEDKGLSFFKSALRQKETRRSTDLGKTALLSKKAGGSSVKSVCKNTGDDEAERGHQPPASQQPNANTTGKEQLVTKDPASAKHSLLSARKSKSSQLDSGVPSSPGGRQSAEKSSKKLSSSMQTSARPSQKPQ

SEQ ID NO: 2881 - protein, 130 aa, Homo sapiens
MLPGPSLLLSASHCRAPPVTGVLPSPGVTEVNKSLVSRDPLPVETHPASSSSPRGRLLRKAGLDCSSCRTRFPPLRSCRLSGAHTWVCSGFSRQLFKAAGRWKFEASPAPATALRTARGHPLRNTRGFLP

SEQ ID NO: 2882 - protein, 231 aa, Homo sapiens
MRTKERDWLPPRTEHSPASRFKDKQFTEGRGSPLGMNNDVFTMGSMTLRILDKRGRTGTEELDRCHVVPAKGREVNRHLQNPDTAGKKNFTRVPWNHLYNDGFKLLKPGLLSHLKSQQMAAEATFGTGGHPRLKGPQTLRTKEVLETKPPIHAGRETTENNQYDSTPYGGPPMMPMMGPPPPPGVMPVEPAPGMRLTMGGHMPMMPGCPMMKPPARLMMVPSQPRMTRPDR

SEQ ID NO: 2883 - protein, 51 aa, Homo sapiens
METFLEPNNKKLLFPVGRSWSCFAQTPTLAKYIPYSLWKYSVLSGHSWPLG

SEQ ID NO: 2884 - protein, 232 aa, Homo sapiens
MARLLRSATWELFPWRGYCSQKAKGELCRDFVEALKAVVGGSHVSTAAVVREQHGRDESVHRCEPPDAVVWPQNVEQVSRLAALCYRQGVPIIPFGTGTGLEGGVCAVQGGVCVNLTHMDRILELNQEDFSVVVEPGVTRKALNAHLRDSGLWFPVDPGADASLCGMAATGASGTNAVRYGTMRDNVLNLEVVLPDGRLLHTAGRGRHFRLRLLARNPSSHSLVLTLCVPGT

SEQ ID NO: 2885 - protein, 115 aa, Homo sapiens
MAVSKKPGWAIPLIRRPCSLQRPDFTAQSSFPGVQSDVGLGKETGVWEEGAAQESEQAFSNTGIDSPHGIGLRWPFLFRVPPMDRSSPVSFSVWRPDIEQGLFHTDPREYFCAIS

SEQ ID NO: 2886 - protein, 620 aa, Homo sapiens
MRLWGQQKCGYKGPLALCGARSRRGINTLTLTTASFIPTISSEINIDIDECFWAPQERCISPPCSYDQPRDMKISPQTKKRGQAVHYTSTPLFTYISMDHITSEKTSQAETVEAIDAKILGGWVGVYIREGKTFQETLNCGITGLNYDNGLPPATRKMGKLNIFIQAHFNTEQNENSVKTEGLAVGVGFGAIEKTASATFESARGALGVRVTWGSLSPLYPVDQANPAVTLNAAFSLTFHTEALGLVNSLLFYLPGNKQGIEWKSLKSSSEWPQTILDQQPPLKVRRKLQSSKKYTDHFEIIVGSLWIQERQTENILLDKCQVNLRFHSPRAQSHQQHRMKAADCKGMDGSSHLASLHQEVSENCTKRVGEDPLRAKPAPLSREAIPSASAVPAQFLDATQGWAGDSSPQGPTQHQWGWGPNATAINRDLQGRAEASAFAGAPCDWHVSSGLRAVDSNPTLELMQVIEEEERAGRDCVLHWATPTSGPLTNAQQAAGRGNLDGPVRVHGNLAIGIGIQNFPEGLAVSLPLRGAGFSTWRAFWYGQLSGMVEPLAGVFGAFAVVLAEPILPYALAFAAGAMVYVVMDDIIPEAQISGNGKLASWASILGFVVMMSLDVGLG

SEQ ID NO: 2887 - protein, 1051 aa, Homo sapiens
MAEVEAVQLKEEGNRHFQLQDYKAATNSYSQALKLTKDKALLATLYRNRAACGLKTESYVQAASDASRAIDINSSDIKALYRRCQALEHLGKLDQAFKDVQRCATLEPRNQNFQEMLRRLNTSIQEKTIVMSKWDNKCNQMLRVQFSTDSRVQKMFEILLDENSEADKREKAANNLIVLGREEAGAEKIFQNNGVALLLQLLDTKKPELVLAAVRTLSGMCSGHQARATVILHAVRIDRICSLMAVENEEMSLAVCNLLQAIIDSLSGEDKREHRGKEEALVLDTKKDLKQITSHLLDMLVSKKVSGQGRDQALNLLNKNVPRKDLAIHDNSRTIYVVDNGEKRGRFGACSSLLSGHQGTEQKMEDVRLLKGSSVLTEKMRKGIGPSGSTSGPVKVQVKALNSEPEHAQEVPKHIPKTCLRKILKVVGQVPDLPSCLPLTDNTRMLASILINKLYDDLRCDPERDHFRKICEEYITGKFDPQDMDKNLNAIQTVSGILQGPFDLGNQLLGLKGVMEMMVALCGSERETDQLVAVEALIHASTKLSRATFIITNGVSLLKQIYKTTKNEKIKIRTLVGLCKLGSAGGTDYGLRQFAEGSTEKLAKQCRKWLCNMSIDTRTRRWAVEGLAYLTLDADVKDDFVQDVPALQAMFELAKAGVGESGPTTNLRKEWALPAALLRHQPAGHTSDKTILYSVATTLVNCTNSYDVKEVIPELVQLAKFSKQHVPEEHPKDKKDFIDMRVKRLLKAGVISALACMVKADSAILTDQTKELLARVFLALCDNPKDRGTIVAQGGGKALIPLALEGTDVGKVKAAHALAKIAAVSNPDIAFPGERVYEVVRPLVRLLDTQRDGLQNYEALLGLTNLSGRSDKLRQKIFKERALPDIENYMFENHDQLRQAATECMCNMVLHKEVQERFLADGNDRLKLVVLLCGEDDDKVQNAAAGALAMLTAAHKKLCLKMTQVTTQWLEILQRLCLHDQLSVQHRGLVIAYNLLAADAELAKKLVESELLEILTVVGKQEPDEKKAEVVQTARECLIKCMDYGFIKPVS

SEQ ID NO: 2888 - protein, 494 aa, Homo sapiens
MNDDDTDVCPDSACCWMLVEVSQLDLGSHSFHSIWSYWQFLECAKFSLFHTFVQAIPHAGSAALPAPPPIPHVGSAALPAPPPIPHAGGQTESKQSGFDCQLLVAQHLGVLGAHGKLQVPVHSPPFLLCLWLLLSEKRPEALMTHTKPVCTSSFSGPILALFLGPLLFKKKKNKVVLVLPESEYNLPGPRKDSAMSPSAMASKHGGPFIGLSMMLGLVLQVQPVISGVLAGGRQLDPRYCAINYGLKTTWGGWEKFLDSTSPRKRPGLGAGVVQTCAPVLQEAPSEAEFGGSEATSELNPSSVEPPGVTPALPSAACGLCMSVTEAPSASCHQMNFLLSNWSWRNGASIQLLRLETLIKGQQVNLLPFSMQAGSSSCPEESLATTLGSAGAGHTTVALFQDFLFRGEILIIPGDMSELQTPTGPWHTLFMFFHRPDADGLSCIRWCWGLGAPAFHFSDGQFLSDLKLSPYFMVEGEGGPVDRVIACRVFRAFLD

SEQ ID NO: 2889 - protein, 116 aa, Homo sapiens
MSLNISHSLAPPFHRLPPIGDWLGLCREELEIGAIGRRANQSHQSFHRQQRGRNTPSFPSGFPSPSLPPSPYSYQKRLSSDWLELCAISANHKPGCAPTPSEERIVQRPCLRLASP

SEQ ID NO: 2890 - protein, 98 aa, Homo sapiens [sequence omitted]

SEQ ID NO: 2891 - protein, 180 aa, Homo sapiens
MCHPLYKLLIPHTRYTVQINSIGRAVLLNEGGLSAKGMSLGVEGFAGVMVRALSELTYDSLYLPNDFVERGVQDLPGYYYRDDSLAVWNALEKYVTEIITYYYPSDAAVEGDPELQSWVQEIFKECLLGRESSASGSLGGTQGRNPSARGALVTPGSLYKVRLIRCHRSRLRLRRFSSRG

SEQ ID NO: 2892 - protein, 231 aa, Homo sapiens
MGDAGATAAALRPAHNLRPAPPTASAAHAQSSRTSAPSAQRRLPAEPSHRPSGTRTSLTRPLRTVPCPAPLPGSQRVGLMIPRPRIHPHPLLAPGTASTTPCAKWSSSCAALKQLKGPVSDQEKLLVYGLYKQATQGDCDIPGPPASDVRARAKWEAWSANKGASKMDAMRGYAAKVEELTKKEVGGVEREQRGVQDGRHEGLRGQSGGADEEGRASKMDAMRGYAARVRR

SEQ ID NO: 2893 - protein, 798 aa, Homo sapiens
MPLPWSTANKMHIQLLSSHPPMPSPQHSFSKCFSCPALADAEDVKMSNMPALPSKAPASQDDLPRCFYLAALDSSTPPMKNRAKPPDFSEPLSQLPDLTAARIFESCMSDTSGKDCTLLRSHREVLDPSLSSSFSNFQEKTARILASSFAAGVRRSLRARASPAAPLSESRGGAAPAGFKGTAPAEARGPGGRRFSGLLTPSAARPDPPAPPAQAWDRRGSVTPTGAPIWELVSRVHGYQKEVVFTRNRDLLSKLGVCALEEGKDELGLQLKEGQEKEEMKCHDIRPRPSQRTLTRLPARDCQPCLWVPSGGLSAGEPRRLLRQSVREKEEALGYCHLVQRAYKRKAAPVPGLLRFKTAPTAAEITGHAKADNISVFVQCVFEESGQDSKGVLEILMLERWNFILAKDSGDRRPIKPEDMDKYAKPATTGLGHKNKKVTHKFSPPKDEDNTLIRAERILSREEESQGLTVKITGPGSGWSREDYKSVPLKTEDEEYMLALKQELRETMKRMPYFIETPEERQDIERYSKRYMKVLWPQYWKMQLMTISGYRGPSVYGSYHQQVSLLTFTLLSYKTGVTAATFWPSVGPCASPNGPAGEFSASATAAIGKKASMSLLAVSVFSIGQKPKSGPQEASPESLTCCKSGFGYNQEVDGDDTGEGGEGPCASACPNRSQRTELKPRPLTPEVPDDHYGTAQPMTHSGVVHLGTHMKHIQDLPLGKKEKSTYLLAPSRHWKHVPEDDEDLTIESALHLSPALKHCHPCGMPVTQYVKTNNDNRGPARPRRKPLEPPARPRLEPP

SEQ ID NO: 2894 - protein, 505 aa, Homo sapiens
MEREKLERFVIEPQYSWGAFSTRLNGRQVQLEAHFIFSDQGIVGMEFNFIEKYKISRRTLGFCHCRGMLSDAVGWGRLWKSHAPDRVPGRPSPEARPGARLRGPGRLELPVARTLRLRDWRCEADAGGEAPGPVCESGTAAGLSTQRPELAELISGDAGNVRIASSMGEIKLSGPLQFNLEFNNDCGNKNNESDDNNNDGKTRMAAVPQIPMSTCAPEVAARAGAHFRGEGPQAQAPGDGVCPGSTLCWRIQRIQANILGRIMAVLRALTAFEMCPVGVMFLQLGLHARSRFLRNPIGSFTNNRDLLPDPSAASTRSKDLMSSGADFIERHPPPEWLLECGTPGCPLVVASYDLHWRMAVRSKHLSLKRGNEGKTPGDQQLVVHGVSNTGLDTAPCVAHRKHLRNGSARARTVSSSTQFPRFITQFSTQFLFHKINKFRWTPGLHGWDMPWRALVAGAAVGSGAAVAQNSAGKGESSGSQHFGKKPFPTFQYGSARFRLLFDRLC

SEQ ID NO: 2895 - protein, 389 aa, Homo sapiens [sequence omitted]

SEQ ID NO: 2896 - protein, 256 aa, Homo sapiens
MVLNESHSEGSRVIANNTESIPMPYDHVKLTFSDMNNVPEASKGTKKGTIYLTPFIFLSRAKDATQSFVMSFYLLKAYEIKQPVFDTNCIKGTVNTEAGGGWEGSASGKSAFTAGGATESGQQVLQVTSQASRGEALSGAYGHSHVPGRTCVFPPPVTSGMYPCPPGCPSPPPSPEFYPGPPKMDRAMGYVQPPPLPCPGPMEPPVSPDVPCTPAAEARATKAAASTYYNPGKPHHVSMPTKQPPPSYPREDKKTQ

SEQ ID NO: 2897 - protein, 161 aa, Homo sapiens
MHSPPGVSTAGIQKQVSTPSRGNYSTGPPVALATGASPEDSACDKIPRMLQLGAELRPLIITVKCGQPNGSRSIMKRVCMITVCRRSPTTTSVVIAKLLSQGLSVNRALPRPIQECRLTERSARISASGRAVASKSPFTNLEEKQWVNQATVCGMPDENKN

SEQ ID NO: 2898 - protein, 129 aa, Homo sapiens
MIHSVSAASLPTPVGSSLSASVRHQHLSVIGICLSRVICRTTLRTHECQMSPVSWPTRISSSWLKKQPQTATTGPVPNSHDIPVERRKHLLNMFLLCGASSKHPSKAEGGLSLHCPKHLVICQVHTWQC

SEQ ID NO: 2899 - protein, 153 aa, Homo sapiens
MSPPTPKGGGKGGGLRSPLCGRGRWRWRWNRKGVEGGGQEGSADGEAKATLKLVLAVIQEGPKGQCQGQGWELLLQRGTHDPVAIHRAFEEEVGLGQVQLVPEGDAGVLHPCAGLKLHTHLQLVTGFVVVCCVHARLAQRYRCQPVVHCVFPS

SEQ ID NO: 2900 - protein, 790 aa, Homo sapiens
MAYCLTNCYQYSVTFEDTAVDFTQEEWILLDPVQRNLYRDVMLENYENVAKVGFQLFKPSVISWLEEEELRTLQQGVLQDWAIKHQTSVSALQQEFWKIQTSNGIQMDLVTFDSVAVEFTQEEWTLLDPAQRNLYSDVMLENYKNLSSVGYQLFKPSLISWLEEEEELSTLPRVLQEWKMCLKTKGPALWQDNFCLKTLNGIQLARNQNGEELYDCKQCEDVFCKHPCLKTNMSTQNRGNTSECIQYAKDLLSLYNKTSTIRKVSVFSKHGKSFRLILNVQVQRKCTQDKSFEGTDYGKAFIYQSYLEAHRKTQSGEKLNEWKQCGEAFTHSTSHAVNVETHIIKNPYECKECGKDFRYPTHLNNHMQTHIGIKPYKCKHCGKTFTVPSGFLEHVRTHTGEKPYGCKECGKAFGTSAGLIEHIRCHAREKTFKCDHCGKAFISYPSLFGHLRVHNGEKPYEHKEYGKAFGTSSGVIEDRRSNTGQKRFDCDQCGKVFVSFSSLFAHLRTHTGEKPFKCYKCGKPFTSSACLRIHMRTHTEERLYQCKKCGKAFTKCSYLTKHLRTHAGEKPYECMKCGKAFTERSYLTKHLRRHSGEKPYECKKCGKAFTERSDLTKHLRRHTGDKPYEYKDCGKAFVVSSSLVDHLRTHTGYKPYKCNACEKAYSRSCVLTQHLKTHAAEKTSECNACGNSFRNSMCFHDRLKTLTKIKPYKCKDCGKAFTCHSDLTNHVRIHTGEKPYKCKECGKAFRTSSGRIQHLRTHMGEKPFECDQCGKAFASFSARIAHLKTH

SEQ ID NO: 2901 - protein, 426 aa, Homo sapiens
MKNEYKELNDAYTAAARRHTVVLEGPDGIGKTTLLRKVMLDWAEGNLWKDRFTFVFFLNVCEMNGIAETSLLELLSRDWPESSEKIEDIFSQPERILFIMDGFEQLKFNLQLKADLSDDWRQRQPMPIILSSLLQKKMLPESSLLIALGKLAMQKHYFMLRHPKLIKLLGFSESEKKSYFSYFFGEKSKALKVFNFVGIFMFGISTEEIVSMLETSFGFPLSKDLKQEITQCLESLSQCEADREAIAFQELFIGLFETQEKEFVTKVMNFFEEVFIYIGNIEHLVIASFCLKHCQHLTTLRMCVENIFPDDSGCISDYNEKLVYWRELCSMFITNKNFQILDMENTSLDDPSLAILCKALAQPVCKLRKLIFTSVYFGHDSELFKAVLHNPHLKLLSLYGTSLSQSDIRHLCETLKHPMCKIEELM

SEQ ID NO: 2902 - protein, 975 aa, Homo sapiens
MKLDIEQYRMVTEALDERANLPEISPHLSAPLPIMLPVYKWWQLPYYWVGIKLYDLVAGSNCLKSSYVLSKSRALEHFPMLQKDKLVGGIVYYDGRHNDAWMNLAIVLTAARYGDATVNDREVVSLLKKTDTQTDSESAWQEFDMKAKCVINAVGHFTDSVCKIDDKDAAAICQPTAGVHIVMPAQRAWDFLTSDGRVIFFLPWQKMMIAGTTDTPTDITHHPSPSEEDINFILNEARGKDWNPTLYMKLVQDYGLESEGAQHLAATYGDKAFEVATMASVTSKRWPIVGVRLVSEFPYIEAELTDGSEISLLPSDSDRYKKRFCKSDADQKGFITIVDVPCVLESINVQMDENTLHEILNEVDLNKNGQVELNEFLQLMSAIQKGRPCHLPPLTDHLCSCVHSGCVFCRAFQAIRPESRIRKWMGPQKTNSVVFLCSFTQVTLCGIWLGTEPPFVNKDPQFMPGYIIIQCNEGSVTAFYSVLGYLGFLVLGSLAVAFLARNLPDAFNEAKFLTFSMLREQHHCSCVLRRKFSGRNIQYIQPADQYTKTLEEGGAVTCPNLQRKAMKSQGNWEGPLPWRLEAHSENRVESASRPHLPGHHFGASIFGLGNETQSASREQPQPPRRRHATPPGGEAGGDPLCRYRGKRSLPSVLSTFSGDVGEAREEPLCSYQGKRSLPSVLSTFSGDVGEAREEPLCSYQGKRNLPSVLSTFSGDVGEAREEPLCSYQGKRNLPSVLSTFSGNRGEAGGDPLCRYRGKRSLPSVLSTFSGDVGEAREEPLCSYQGKRNLPSVLSTFSGDVGEAREEPLCSYQGKRNLPSVLSTFSGNRGEAGGDPLCRYRGKRSLPSVLSTFSGDVGEAREEPLCSYQGKRNLPSVLSTFSGDAGEARGTLFAAIEGRETSHLSFVLSLRTLDPSLDQATVISIRTFLKVAQPSESPATSNRLGPYERPLERTRDSGRERGRMSDSISKEPLGLC

SEQ ID NO: 2903 - protein, 121 aa, Homo sapiens
MYLASRSMGLARPSRMRILERSLACWRWKLSSCSSHVLKCSASFSRCSISSSCSRMAFSRSRSSRSCFTFCSSSRLSSWILLFRSFSSFSSRWLIPFFSRALFQMKVPSRLLSPKGLSVLV

SEQ ID NO: 2904 - protein, 495 aa, Homo sapiens
MAGIQAETLREACEFPSASAPLTLHFTNSQSHQFLLTNALAPPPADSVQDSPKSSVVRASSTCRWPQPRRYTTQAFGSSFGADTTLSKELKDSGAKKKSLQETDKHWQWLTWRTLEIFTMKGSRRPRSPSDSCTESKSDHAGESGEAQVDGLQLHAIKCPKTPESGGAGSSSRCRTSSGTASSTPPCTAAPGAAPGPQLPQRKMIIAILEPGMVLHLRLGQEFLGLDPQGALRLSLLNVQLLVVPEQLLMSLKDLLYPAHARWLLLTSTETVWEIDIENGSVRAQRAENVCVAPSVKEDLYLHHPVRSPEFATSFYGGQRARPEDVSSKAHGPCTLRHQTGIRDALFRMKHTCFFMVSPCTHVSASRRREMLRMLERNSQSHQFLLTNPLAPPPADSVQDSPKSSVVGASSTCRWPQPRRYTTQAFGSSFGADTTLSKELKDSGAKKKSLQETDKHWQWLTWRTLEIFTMKGSRRPRSPSDSCTESKSDHAGESG

SEQ ID NO: 2905 - protein, 113 aa, Homo sapiens; identical to SEQ ID NO: 2168

SEQ ID NO: 2906 - protein, 104 aa, Homo sapiens
MGPLLTSSIHRHDFFKGVDRFASTAARSSLAAENQKYSPFTSTGSLYLTNAAARNVSTALPRHLYPHSQLLPQSDETLLFVRKGPKINPTAHVGDGTEEEVKKD

SEQ ID NO: 2907 - protein, 336 aa, Homo sapiens
MGNQLCSATCTDMPYHKRDLTWACPHPLPNPPLGLRSGCSPGPKPMPSFPGQASQKLAANLATSAVITNHVQDHLTWPMARYFQMVVELHSPSCSRDPYFCSVSTVSDGHSARWQAMLSFFPGEETMHPLLVSSYVCLVLLTVCTIRESSACCSQTSHANEDLDRMYLAGASGREGVTGYIELLLRHLCIQAREKTERLPARGDRFPPGLERSGQAAALEGRPKQGRQALMTDICVDNCICSIQRPFWASQQLSEQSSEDEVGVGGSMFPLDSPGFSPQCSDVLGASSVLKNLLLHAKHSETHFCCSFPARSFRRPLPIALLQGALQSRIEDTKSV

SEQ ID NO: 2908 - protein, 53 aa, Homo sapiens
MKTCASQQEGFLEEVMPKRKAHVWLLESAYFREAANPTLTSKGNLKNTWSKNC

SEQ ID NO: 2909 - protein, 1579 aa, Homo sapiens
MDQDCSGCIKSRPALKSGFDNSSLSGEERLKCKLGKSFLLEKSLGKGMLIHCSLGVSMGKGKPPSPLTLTSFPPFCDLAKSAFHVVLTTTGVKLTMIPYSRSRLMSSEDLAEIPQLQKLSIPHGFQNKEAASSPTPSITLSQVPDLQPGSQLFTEIHLAKIEKMFEEDINSTGALGMDAFIKAMKKVLSSVSDEMLKELFLKVDSDCEGFVTWQKYVDYMMREFQGKEDMRKSQYRLHFYLPMTVVPLNHGCEVVKVVFLIHRFKKIGCFLTVTKDGILQFWSESFSLMSSFRLNQTQQLYNQPMWVIDMVCLHNMNLVAVASTRQKIDFFDISDHKCVRAFTFVDLDSCALVMDYWSDYHRGVFCYGDAKGNVIVFTSENMTSGLFNPRILPRASKWDHWIKVSLQKLLNEKSALHRSYRLKALHPNWCEQVKFIPQMNVVVSCSAIEKSSLVLTILPAKASKKPRLSVLRLRKGILCFDYCPDRNFLVTGGYDAFIRLWNPFVSKRPVWLMKGHQTSVTHILVDSRNNSILISVSKDKNIRVWDMLDYICLQSFCGKFFALGNCPITSAYFFEKDNTLICSTYSIGILKGYLEAQGLIKARKRTTHCSPLCAVLYSKIFKQVVSGCLRGTVSVWEVVTGRKTMEFAVSGGQHVEMTAMALDESERCLLTGLRDGTMKMWNYNIGKCLLTFPSPEQLEISGIIHMNKVFYVTGWSKRITHFLFHKTKPVLLCYHWQTYHTEDILSMAKYRNQFLGTSSYSGDILFWNTGTLKPIFNFNASRSPSPLQPKRVQDVNNCLAESHRPSRPYVEREKWTYKTSRKLSSLSPESVANTNLRRSLVSAPPVMRCPRDKEPDRPVPQQKPSSASGTSRQSSKIHSKQSIYKEDETRKGEWQKNMLVQSSASVEKIIFLQTRPRLPHTAALLSSCMDGYIYAWSLHENGGLLGKFPVDLDNGDVVVGAMATDKNDWILITGDCKGYIKIWDIKDYCALIDKQPFQSSGAKVVSEAHNKFRLLIPQQLGTNFPHYIPLEDKEVVAGHTISLVPPTLLMTWKGHLNSVADILYVDNFQLVISAGQDRDVKAWKLSGDAIVGGHLVKESPHTREQRDLAEALIYQRREQAALMALLHGKADKEADTWAKLQKMALMSPWAGERPLEDIEDSWNKWESRDKQVSKVLGAAYKPKERLQNTRFLSTRVPYGWMKHQPFSEGGQEPLSFNRILGHGQVWDETNVASLFAKALAEGGCMGPQATVVSGSHSPLDTRLLGMGRPQGASFLSPSCCGPSQPPQPIPPPRSHPRCPSPPCRDPEDVALPPATPLGLSGEVHLSPNLVFSLAPHRALGQKINVLSCGHPQPPGHACPNPGLQKHLGAAVLPGGSALDVKEHSHCTTAWSSDSGPATAPRICALPGHFQAFLLAVFFVLINVPPQIPPCTQELVILHAAITAQPPTPHSSGAHTCCNLRLLDFGWGHGSWPLSSTDKKLEEGAGGFEGRGMLTAEHGKLRAELRAEDSHRYPTVLIKLASSDLGAKADLGTPMVLLEEGPWMVEMCTLVELLLCGPNGSLPPAARTQRGSHPQSHVCG

SEQ ID NO: 2910 - protein, 164 aa, Homo sapiens
MQGRRCVVSFSRKAAGPGLPRASRETWATLAVLDAKPRAHKRHSAPDTVRRRPTGPSEGAAAAVTLAAGCVLRHLRSLCAGPSVGNTDPYKSLQHGPIPQIAEPQHRRDRDREGQTQGAGDPPPSEPSPPSDPPPSDSLPSDPPPPSDLPLSSDSQLGILGQED

SEQ ID NO: 2911 - protein, 150 aa, Homo sapiens
MWRGRAGALLRVWGFWPTGVPRRRPLSCDAASQAGSNYPRCWNCGGPWGPGREDRFFCPQCRALQAPDPTRDYFSLMDCNRSFRVDTAKLQHRYQQLQRLVHPDFFSQRSQTEKDFSEKHSTLVNDAYKTLLAPLSRGLYLLNRKNLLTM

SEQ ID NO: 2912 - protein, 109 aa, Homo sapiens
MSEETRRKVVILGDNWKQELTKFISPDQLPVEFGGTMTDPDGNPKCLTKINYGGEVPKSYYLCKQVRLQYEHTRSVGRGSSLQVENEILFPGCVLRCPEVLQHLQPGSF

SEQ ID NO: 2913 - protein, 139 aa, Homo sapiens [sequence omitted]

SEQ ID NO: 2914 - protein, 179 aa, Homo sapiens
MAPGRPPVHPSVPLRPGPASCTATAAAPPRTEDRSSGGPSGSCGVGSRALWCLQSPPQAPIHGQLGPKGEGVTSQVVVTQEHSLSTTPGGAVTFTYGSKIGAVIRASRQLGPTEHLAMSPGQWEESTNNSHLSPAEGAVDLLRGAQPEDEAEYTVGYTTVVLSTVRDPDGEAGHERAFG

SEQ ID NO: 2915 - protein, 424 aa, Homo sapiens
MDPIKQPASSFDITEAAVSFAKDSLAGGVAAAISKMAVAPIERVKLLLQVQHASKQITADKQYKGIRDCMVCIPKEHGVLSWCDKYKQIFLDGVDKRSQFWRYFAGNLASGGATGATSLCFVYPLDFAHTRVAADVGKAGAERELRGFGDCLVKIYKSDGIKSLYQGFNVSVQGNASGSQEHSHCHQLDDAQTVTAVAGLTSYSFNTICCYMMMQSGCKGTDIMYTGTFDCWRKITHDEGSKAVFKGAWSSVLRGMGGAFVLVLYDETKKYIKLSGGRKDRRKTWISAFGNVYFDLPDNYIQTDLSVLAPSTSSSLSFNAGWEKRKLRAKRHLVRGSRRRYTPSTCPHPTKSQAPKGSHAATEGPRLLTTAARRASPQAPFTVRDEGSAAVLGVALIHRHLASGLLPPRRWKGAGPAPSCGARF

SEQ ID NO: 2916 - protein, 150 aa, Homo sapiens
MTLDSWLLITRVVGESRRRQQSSLKKTSGLKKLPTLVLAIGNTVYKCTLLQLVLENLGTDASPQGNIRVGDQARVIAHVPSPNKASKPTTQTWVQRQTLPLTERSSVSLSGEWESSLTGAKTLALGMIKFKAFLGHSHNQSLQAFTCTTI

SEQ ID NO: 2917 - protein, 329 aa, Homo sapiens
MRNEVAEREKADINVTLVFQGYESTPIMRRRGKKPRQRGQKSGGRGKKPRGRKAAKSSGGGGKKPEQQKASAAGAENRGGGEQKAAARERGQKKNTKSRDGGGQKPRRQKAVATGAESRGGGGKSRGDKKPRGRGAKSRSGGDKKRRRREAKSRVGKTRGGGRKKHRRPKPAAGGAKTAVAGAKSRKKPRRRGPKSAAEKVAGWGWQKAAAAGAKSCKNLRRQRQKTVASGVKSHSGKKRRRRGQKAAAAGQKAGAAKSLGGGDQKPRRWVKKPQRQKAVATGADSCGVKLKASEEMPLASFVCARIRQGKAADALVSRFLASYREKHV

SEQ ID NO: 2918 - protein, 205 aa, Homo sapiens
MGKVKVGVNGFGRIRRLVSRVAFNSVKVDIVAINDPFIDLNYMGGAKRVIISAPSADAPMFVMGMNHEKYDNNLKIVSNASCTTNYLAPLAKVIHDNFGIVEGLMTTVHAITATQKTADGPSGKLWHDGHGALQNIIPASTDAAKAVGKVIPELNGKLTGMAFHAPTANVSVVDLTCCLENPAKYDNIKKVVKQALKAPLKGILG

SEQ ID NO: 2919 - protein, 615 aa, Homo sapiens
MTILPKKKPPPPDADPANEPPPPGPMPPAPRRGGGVGVGGGGTGVGGGDRDRDSGVVGARPRASPPPQGPLPGPPGALHRWALAVPPGAVAGPRPQQASPPPCGGPGGPGGGPGDALGAAAAGVGAAGVVVGVGGAVGVGGCCSGPGHSKRRRQAPGVGAVGGGSPEREEVGAGYNSEDEYEAAAARIEAMDPATVEQQEHWFEKALRDKKGFIIKQMKEDGACLFRAVADQVYGDQDMHEVVRKHCMDYLMKNADYFSNYVTEDFTTYINRKRKNNCHGNHIEMQAMAEMYNRPVEVYQYSTEPINTFHGIHQNEDEPIRVSYHRNIHYNSVVNPNKATIGVGLGLPSFKPGFAEQSLMKNAIKTSEESWIEQQMLEDKKRATDWEATNEAIEEQVARESYLQWLRDQEKQARQVRGPSQPRKASATCSSATAAASSGLEEWTSRSPRQRSSASSPEHPELHAELGMKPPSPGTVLALAKPPSPCAPGTSSQFSAGADRATSPLVSLYPALECRALIQQMSPSAFGLNDWEDRQEAHRDRPTGSQAAPEERDIQTEESLPAPHSFQDEKNLPPPPDTDAREVGGRSGKFPFPVPPRTSEPSMLNFFFIKITFIL

SEQ ID NO: 2920 - protein, 134 aa, Homo sapiens [sequence omitted]

SEQ ID NO: 2921 - protein, 142 aa, Homo sapiens
MARTRWTARKSTGGIAPRKQLATKATCKSAPSTGGVKKPHRYRPGTVALREIRHYQKSTELLIRKLPFQRLVREIAQDFKTDLRFQRAAIGTLQEASEAYLVGLFEDTNLCAIHATRVTIMPKDIQLARHIRGERVSEYTMM

SEQ ID NO: 2922 - protein, 343 aa, Homo sapiens
MTTVLTYTFKKCTSDALLTASEWSLRFSIRPLSYSSQATLTGLLHQPSVPKEVVDYIIFGTVIQEVKTSHVAGEAALGTAFSDKTPAHTVTMACISANQAMTTGVGLIASGQCDVIMAGGVELMFHVPIRQSRKMRKLMLDLTPELPEVSEFSTSETTGHSADQLAVSRLEQDEYALRCPSLAKKAQDEGLLSDVVPFKVPGKDTVTKHNGIRPSSLEQMAKLKPAFIKPYGTATAANSSFLTDGASEAEEKALAMGYKPKECLRDFMYFAQNYMGRKSKVTLLPSEKFNNWGGSLSLEHPFGATGCRLVVAAANRLRKEGGQYALAAACAAGGQGHGHSIAN

SEQ ID NO: 2923 - protein, 92 aa, Homo sapiens
MLLEIQVHITHTTVGVMKIPGNYGTVDVTEPLLKNMFVGSFPVDFWKLKYAFVLQLGLSNFSLLDTGEEFTKFWYINVDYTDEVEKRNVSDF

SEQ ID NO: 2924 - protein, 429 aa, Homo sapiens
MTYITNQAAVYFEKGDYNKCWELCEKSIEVGRENREDYLQIAKVCARIGNSYFKEEKYKDAIHFYNKSLAEHRTPDVLKKCQQAEKILKEQERLAYINPDLALEEKNKGNECFQKGDYPHAMKHYTEAIKRNPKDAKLYSNRAACYTKLLDSSWHSRTVKNGYTRKAVALEAMKDYTKVMDVYRKALDPDSSCKEAADGYQRCMMAQYNRHHSPEDVKRRAMADPEVQQIMSDIAMHLILEQMQKDPPGTQRTLKESCNRKEDPEADGCGSDCNSTMTCPSPLPFALMRKEERGPRQAARSGRESRGREGLTSLYLYPSRLENVASLQMLETLFSVFRNATAAPFSTIPISLGFSDPLELVPGAQGLLSVPCYGSYSIIEITIKELLAVCESSQERLRILYTKIFDVPEKMPKNATYRRPIFDDFRVAK

SEQ ID NO: 2925 - protein, 170 aa, Homo sapiens
MSRERLLSSPSADRETEKSRGELAAASPASPYTGIGPSSLACLGTEKAASAPGACPPPMPGAFLGIRSTRRLSTRGGAIGASEARKDASGPELPRPPAGQGRGKLPAARGGRGHVVVGSCRGVPPEKTVLPVAAKTETQEVAWRTQEDHGKKKAADHMSFLKDFPLFFCS

SEQ ID NO: 2926 - protein, 553 aa, Homo sapiens
MAASKKAVLGPLVGAVDQGTSSTSFLVFNSKTAELLSHHQVEIKQESPREGWVEQDPKEILHSVYECIEKTCEKLGQLNIDISNIKAIGVSNQRETTVVWDKITGEPLYNAVVWLDLRTQSTVESLSKRIPGNNNFVKSKTGLPLSTYFSAVKLRWLLDNVRKVQKAVEEKRALFGTIDSWLIWNLTGGVNGGVHCTDVTNASRTMLFNIHSLEWDKQLCEFFGIPMEILPNVRSSSEIYGLMKAGALEGVPISGCLGDQSAALVGQMCFQIGQAKNTYGTGCFLLCNTGHKCVFSDHGLLTTVAYKLGRDKPVYYALEGSVAIAGAVIRWLRDNLGIIKTSEEIEKLAKEVGTSYGCYFVPAFSGLYAPYWEPSTRGIICGLTQFTNKCHIAFAALEAVCFQTREILDAMNRDCGIPLSHLQVDGGMTSNKILMQLQADILYIPVVKPSMPETTALGAAMEAGAAEGVGVWSLEPEDLSAVTMERFEPQINAEESEIRYSTWKKAVMKSMGWVTTQSPESGDPSIFCSLPLGFFIVSSMVMLIGARYISGIP

SEQ ID NO: 2927 - protein, 91 aa, Homo sapiens
MLPEHPQMNQACNQRENVAYPVFTSDTHIHPQAMRTFSLTFSAWIRGSFLISLPRGAVSYSSRNRQSDTRTRGNGGGCVWGLTRHLGLKTR

SEQ ID NO: 2928 - protein, 125 aa, Homo sapiens
MKYVIFEISYTFERLRYPYEYPLFIYLAVFLDLPLLATDREKEVHLSSTEDGFLMSSEYQGSRKDLNGSVTGCDAGLTNRTLLPRILNLERVPTKRVSARLAMDSIVKQLCDSDNDNGSSIAAVS

SEQ ID NO: 2929 - protein, 208 aa, Homo sapiens
MAKQYDVLFRLLLIGDSGVGKTCLLCRFTDNEFHSSHISTIGVDFKMKTIEVDGIKVRIQIWDTAGQERYQTITKQYYRRAQGIFLVYDISSERSYQHIMKWVSDVDEVGDATSLPGCGEGASPGKARRGPDGKANASRKLCLPQPWMKTSGTHQKASRRSLLGIRLMRSRNGRWEESKGSSWRRSMAWTSMKQVPAPTSTLKSHSRV

SEQ ID NO: 2930 - protein, 216 aa, Homo sapiens
MYLVTVLRNLLSILAVSSDSHLHTPMYFFLSNLCWADIGYTSATVPKMIVDTQSHGRVISHAGCLTQMSFLVLFACIEDMLLTVMAYDCFVAICCPLHYPVIVNPHLCVFFVLVSFFLSLLDSQLHSWIVLQFTIIKNVEISNFVCDPSQLLKLACSDSVINSIFIYFDSTMFGFLPISGILLSYSKIVPSVLRMSSSDGKYKAFSTCGSHLAVVC

SEQ ID NO: 2931 - protein, 289 aa, Homo sapiens
MPLEKVRPSSVATTWAGIGTCYCDQKEKSNKKKRPKERIWSEKKIKQKEEGDKGKQTIVVPIKILEKENIKVIADESVGDFFRLKFGRKRANPEKNIGGTGIRHKKLQETDSPSQLVAKENIIYTVFERPPVLSDAQGLIDVPHNWYMSVTLNQLLLESQEKHFKLLSSEISKGDGNLQLLCMKQYHLQTWPAQPLLQTLTNWSGLLITCEEENELGTHLTKNKSEKARKNEAAEKVSYDYQHTGEKPYGCNECGKAFTFKSQLIVHQRVHAGVKPYGCSQCEKTFNLK

SEQ ID NO: 2932 - protein, 384 aa, Homo sapiens
MTNGEIDDAETEETMVAANGWFLLALSHNLTTEEPDQILPHMAIFIRQTGKEAIIQAFRKDACEAKEIPCTTSSVTGSVAVVGVKMNTPGNPQLEQRRGDTYILQVIKLQEWLSPQSQSNCGQFLEIPDMIEQEKPQSLRFEDLNKQYFLNGLERSRKFYEISAEKKPQQRAKSSAGEKKHTPVGKTSFSKNTSRASKEQWLKHQLTGKRDKQGLYRLLTFLTHGSSKEVKHLLYNLKSVDIMSSSPQVELKIDEPRASLECKLAQHTTFTVAVLVATTRESEAMAVLKLGIKQILVLKYWGGGAPDIRCHTFQERRDLPPTFSSGKATAVTQEVNRAEEVKWAVGLLEIIKEGDGLATTVASGREKHQNQWPAGSVWENTAFF

SEQ ID NO: 2933 - protein, 403 aa, Homo sapiens; identical to SEQ ID NO: 2065

SEQ ID NO: 2934 - protein, 972 aa, Homo sapiens
MPHFLLAICFVQKVVFLCAFYSWAKASRTFLKADGLPRRKQWVLVEALAGGGVLGVSEACHPSSGKARCGLESEVKRAGPCSRGPGNQQDLGEPVPRNSRGEAPDHQLFEYVVYVAEQITIQVLFEVLLRRGKESETYTKMYRRLGPERCRRSKYAGVERIVDKRKNKKGKWEYLIRWKGYGSTEDTWEPEHHLLHCEEFIDEFNGLHMSKDKRIKSGKQSSTSKLLRDSRGPSVEKLSHRPSDPGKSKGTSHKRKRINPPLAKPKKGYSGKPSSGGDRATKTVSYRTTPSGLQIMPLKKSQNGMENGDAGSEKDERHFGNGSHQPGLDLNDHVGEQDMGECDVNHATLAENGLDTCVSTWWHLSLWLPETRALECPEILQECGQPLPNRAGPSDSLMKPGITTASLGEELVPEEAQGNWFRKALTVIGSGPTLSGEPLRGSIEAKKLIRAGRTVGAQNRRASCPALQPMRGMWDLNAGSAPDWTSPWLLGSAEHVFPASLLLSLGKHDAPEGEGPRGLLGSWSISVSYIVYLVLEGSALTNGGLNLHSPVKRKLEAEKDYVFDKRLRYSVRQNESNCRFRDIVVRKEEGFTHILLSSQTSDNNALTPEGRLPAQAEADSLASTLRGSGLWLSCSLKAPGLQDRHLTSLQIHLCRQIMKEVRRALCNAATDDSKLLLLSAVGSVFCSGLDYSYLIGRLSSDRRKESTRIAEAISPAIAEGSDIGAAGPVMQYPVCCLAPSDRDLLPEVGKHRMKGSGVLQRKALESHKGCSPFLKDVMWLMELRDFVKAFIQFKKPIVVAINGPALGLGASILPLCDIVWASEKAWFQTPYATIRLTPAGCSSYTFPQILGVALLSVLEGGPTLFREDPFEQANEMLFCGRKLTAQEACSRGLVSQVFWPTTFSQEVMLRVKEMASCSAVVLEESKCLVRSFLKSVLEDVNEKECLMLKQLWSSSKGLDSLFSYLQDKIYEV

SEQ ID NO: 2935 - protein, 833 aa, Homo sapiens
MVPSRRTWNLGATPSLRGLWRVGRAPEPEPGMARPAPAPASPAARPFPHTGPGRLRTGRGKDTPVCGDEDSSARSAARPALAQCRALSVDWAGPGSPHGLYLTLQVEHLKEKLISQAQEVSRLRSELGGTDLEKHRDLLMVENERLRQEMRRCEAELQELRTKPAGPCPGCEHSQESAQLRDKLSQLQLEMAESKGMLSELNLEVQQKTDRLAEVELRLKDCLAEKAQEEERLSRRLRDSHETIASLRAQSPPVKYVIKTVEVESSKTKQALSESQARNQHLQEQVAMQRQVLKEMEQQLQSSHQLTARLRAQIAMYESELERAHGQMLEEMQSLEEDKNRAIEEAFARAQVEMKAVHENLAGVRTNLLTLQPALRTLTNDYNGLKRQVRGFPLLLQEALRSVKAEIGQAIEEVNSNNQELLRKYRRELQLRKKCHNELVRLKGNIRVIARVRPVTKEDGEGPEATNAVTFDADDDSIIHLLHKGKPVSFELDKVFSPQASQQDVFQEVQALVTSCIDGFNVCIFAYGQTGAGKTYTMEGTAENPGINQRALQLLFSEVQEKASDWEYTITVSAAEIYNEVLRDLLGKEPQEKLEIRLCPDGSGQLYVPGLTEFQVQSVDDINKVFEFGHTNRTTEFTNLNEHSSRSHALLIVTVRGVDCSTGLRTTGKLNLVDLAGSERVGKSGAEGSRLREAQHINKSLSALGDVIAALRSRQGHVPFRNSKLTYLLQDSLSGDSKTLMVVQVSPVEKNTSETLYSLKFAERVRSVELGPGLRRAELGSWSSQEHLEWEPACQTPQPSARAHSAPSSGTSSRPGSIRRKLQPSGKSRPLPV

SEQ ID NO: 2936 - protein, 1915 aa, Homo sapiens
MGAVKLGTRYNRISNVLFLKLVGHVGAGCIILSTFWNALNISQLDTLKAVEPPWTEPPRKPTFPRAEGPTRGGLRGLCAGGAQQTRQPTMGAGSLTPPSMRAGGGGSQGKLLNLNQTFRRAAGDVRLPPHCSPTAQGHQSPGKRGKGDADVCVFRQQSRLSLPRSPTARMFILPGGQQPGASSEPERYRRLVTSGQRSPGRLEVSCGPPRRGARSTVAPGCLEFPSPAPPQWACIRTAGRKLAANPLLPPGGEKAHLPVGVIYDPITAEASEGLQDGWPAASRERGGENTCRAPEKELSATGSGRMQGRISYLLGCLPEGPQGAEKPSKTRTGLLCPLLCVPSWILALEDLFPVLHASINILSPQESLGFISWSSSRSLKNRALRHPEQSTHTPGPSPGVGSEPGHRQGQRVTMWPLKQRSPRPGPMDLISLVWEANPVSEGLVTTRRPSLPPPQSRFARVGEHPIWPPSVLVQGSSQVEEREQQQSREETAEQHGGSHKDRDEAPSHCGDSPPPTTSRTEPGLCSCVSSQDHTPGRQAGRAEPPAHSAHTTRPQALSVPKSAIKEPGGEAEQRVQSLFGLGMKREKPGVCTFFGGAVALCDTRCFPDMGAGLGPTLMGALGLVKMRREPPSWLRSCSSETPALPLTWGSPSQGVEGPGHSPALAVKPAMMEEGEGEKPLTPHLPEEQRWPRSSVSSPWPGEGTRGAEQRGRAESPALELYSRQPASGHLPDGHFKCNTWEPKLPTWMPRTQGGTVSELGSGSPHPCWDNRIPAQYPEIQKELASTCTSKPHLLGHPKLELLEPSRQLASTARSPEASKREPEAKPKGPALSCPLAVENRWGGTWFGARPGGDQLYATSWPESHLWLTNTDISSRSLHQGESKGAQNWWDPPGTWQHWPLTTDSRVPPRVLPPAKGTDPCEGQDCKAGLDSQGSLVNINGHARLWGTQGFVIMDYLLLSTILKVETKVLSQCHIPVPEIWIADPHPQTISNLGTALPGPGTASSAQPLKETYLSYSLCPAFSAGPPFQRHPLFMHKWLGEGCGSEMFNRLPNVRQPEDDRLSPWCALNLTETDPQHMRSEEEEFIQQVSQKDMRVGAGDSKGSGEESRVGGIHLPMTVTAPRLRAPGKNRTGGQQEQDEQGQHPQVQHREGVASVFILLIQRGRRHGSGALQPLTVPQHQLPSPSSKDSHKDKPGHSVSKSLAHICKASLRQSKWATNSILPFRGLQQPSEGSGNVKALALNAVSHPETAQKRSIEPCDPIFGFETAALQVPGPPEIASHVLPQDSVSTTNHKRRAARLTAAWLRRDSIQRLPLGLPLHCPTQCPGTDRKFWVTRLLFQNFLHKFLTTDGGKLVFSLALRPSIYRLGICLNVKREEEEKGGGGLVRGGQSTDLHCPLLATGSPVPLPLWTSVTPPPVGETSDQSLLERSSPGREDTRTSGWEPHTDAGLGHGILHASPLPVRHKLKTGTQRRLKTFPRDSWEVAAFTSPYFGETALGVQGREAKPAWATLVPEVELAQLLQQCARTPPTSPDMRTVAGGIQGPKRATDRATRPRYTAQGALEKDPRGTEAEAHGVPQGGKRRIRKQSLGEEPHLTSLLPGGSCPRCRHSPRREITKPAPEDLEPAISFTAESKFPNSQARACVHPRFTREETEAGPGRSRFPRQVTGRSGLGGFPGFPCGQVKAGRGVGEDIEKAAQDSEIQVLPLALPPLACHLQTGPFLNRHRNSNIPDPAPGAFRTKPLNNSGLQPPPMSVCYGSDTENGHFPAPCSGTRQTLPNCLLSGEAGWGSHTGLLRDEGTARAGEAEEQERMQDMALAGHLVSMTRPRHSPPAGLVHEPEFSVTPQNTHLPPPAQSPSPETGREARGAGETRVQLWRAAPGAGRVTRWSPRPPTLSRVEAHFAKASLPPELLPTRP

SEQ ID NO: 2937 - protein, 139 aa, Homo sapiens
MSKHGGWAAAASAKPVRTASSPHNGGHAKDERTAVQSLSSSLLLNSPLMSVSAFTHLVALLEPHCVLKAFPASFCFLLPFSVSGKYTFDIVTGAEGAVAEEVERVKVTLRQRLGIGWSGTGKQMEDVVETHKRLQFGEG

SEQ ID NO: 2938 - protein, 927 aa, Homo sapiens
MAHESAEDLFHFNVGGWHFSVPRSKLSQFPDSLLWKEASALTSSESQRLFIDRDGSTFRHVHYYLYTSKLSFSSCAELNLLYEQALGLQLMPLLQTLDNLKEGKHHLRVRPADLPVAERASLNYWRTWKCISKPSEFPIKSPAFTGLHDKAPLGLMDTPLLDTEEEVHYCFLPLDLVAKYPSLVTEDNLLWLAETVALIECECSEFRFIGDCSVRVNFLRSQKILLPDNFSNIDVLEAEVEILEIPALTEAVRWYRMNMGGCSPTTCSPLSPGKGARTASLESVKPLYTMALGLLVKYPDSALGQLRIESTLDGSRLYITGNGVLFQHVKNWLGTCRLPLTETISEVYELCAFLDKRDITYEPIKVALKTHLEPRTLAPMDVLNEWTAEITVYSPQQIIKVYVGSHWYATTLQTLLKYPELLSNPQRVYWITYGQTLLIHGDGQMFRHILNFLRLGKLFLPSEFKEWPLFCQEVEEYHIPSLSEALAQCEAYKSWTQEKESENEEAFSIRRLHVVTEGPGSLVEFSRDTKETTAYMPVDFEDCSDRTPWNKAKGNLVRSNQMDEAEQYTRPIQVSLCRNAKRAGNPSTYSHCRGLCTNPGHWGSHPESPPKKKCTTINLTQKSETKDPPATPMQKLISLVREWDMVNCKQWEFQPLTATRSSPLEEATLQLPLGSEAASQPSTSAAWKAHSTASEKDPGPQAGAGAGAKDKGPEPTFKPYLPPKRAGTLKDWSKQRTKERESPAPEQPLPEASEVDSLGVILKVTHPPVVGSDGFCMFFEDSIIYTTEMDNLRHTTPTASPQPQEVTFLSFSLSWEEMFYAQKCHCFLADIIMDSIRQKDPKAITAKVVSLANRLWTLHISPKQFVVDLLAITGFKDDRHTQERLYSWVELTLPFARKYGRCMDLLIQRGLSRSVSYSILGKYLQED

SEQ ID NO: 2939 - protein, 313 aa, Homo sapiens
MTVENCSTPTQTLAPDTYMHITELSVSLSGTHLGPLWLQKRELKLRKVKMFANDSKGHTSERNAYGYKQRKYFLNNLIRNQKAGNPMVGPVIQQVSRLLGNKKPEHKEILVERTVVTVMMTVAVKVGVLFGEDSGRSLSDCSQWVENALNVAIPPASIALPPHLLLSSDKLDLPGVCIDIAKAVNQPPAIWYSRDKPEDSRKVMKVMMAATTMDKTCKEPWWSRSHRKTYAIIKAFELKSYCKNQDVSSNGICLHIFIDQTESFYSVAPTAGRRITFINHVKMNAAVMCYQEETVRSLRTGTMYSPVELPYSL

SEQ ID NO: 2940 - protein, 425 aa, Homo sapiens
MAAVSPTTRCQESVTFEDVAVVFTDEEWSRLVPIQRDLYKEVMLENYNSIVSLGLPVPQPDVIFQLKRGDKPWMVDLHGSEEREWPESVSLDWETKPEIHDASDKKSEGSLRECLGRQSPLCPKFEVHTPNGRMGTEKQSPSGETRKKSLSRDKGLRRRSALSREILTKERHQECSDCGKTFFDHSSLTRHQRTHTGEKPYDCRECGKAFSHRSSLSRHLMSHTGESPYECSVCSKAFFDRSSLTVHQRIHTGEKPFQCNECGKAFFDRSSLTRHQRIHTGESPYECHQCGKAFSQKSILTRHQLIHTGRKPYECNECGKAFYGVSSLNRHQKAHAGDPRYQCNECGKAFFDRSSLTQHQKIHTGDKPYECSECGKAFSQRCRLTRHQRVHTGEKPFECTVCGKVFSSKSSVIQHQRRYAKQGID

SEQ ID NO: 2941 - protein, 243 aa, Homo sapiens
MITPHQGGGKGQSFHSAHPDNNHPLKPQNKGPLASSTIHLEGTGGLKQGASISPVNQAYYSPGWCIAAVAYMATVSRQLVQNLHFVPTLNINSPKAFSGWRFLLSSPTRAFDSNSALQPEAGGRKPGAPGRQPNWWARRSPRGSRARACPATEEPELLRDGDPQAPGSRPNRSCPAPEPTCRTWAAARPGSQPLATRAGRPEGTKAFRGGDEPPSPPRFQRAGCRGPRWERPPRLPDFPALGR

SEQ ID NO: 2942 - protein, 896 aa, Homo sapiens
MRFTVRDCSSLPNVPGSCKETFNLYYYETDSVIATKKSAFWSEAPYLKVDTIAADESFSQVDFGGRLMKVNTEVRSFGPLTRNGFYLAFQDYGACMSLLSVRVFFKKCPSIVQNFAVFPETMTGAESTSLVIARGTCIPNAEEVDVPIKLYCNGDGEWMVPIGRCTCKPGYEPENSVACKACPAGTFKASQEAEGCSHCPSNSRSPAEASPICTCRTGYYRADFDPPEVACTSVPSGPRNVISIVNETSIILEWHPPRETGGRDDVTYNIICKKCRADRRSCSRCDDNVEFVPRQLGLTECRVSISSLWAHTPYTFDIQAINGVSSKSPFPPQHVSVNITTNQAAPSTVPIMHQVSATMRSITLSWPQPEQPNGIILDYEIRYYEKEHNEFNSSMARSQTNTARIDGLRPGMVYVVQVRARTVAGYGKFSGKMCFQTLTDDDYKSELREQLPLIAGSAAAGVVFVVSLVAISIVCSRKRAYSKEAVYSDKLQHYSTGRGSPGMKIYIDPFTYEDPNEAVREFAKEIDVSFVKIEEVIGAGEFGEVYKGRLKLPGKREIYVAIKTLKAGYSEKQRRDFLSEASIMGQFDHPNIIRLEGVVTKSRPVMIITEFMENGALDSFLRQNDGQFTVIQLVGMLRGIAAGMKYLAEMNYVHRDLAARNILVNSNLVCKVSDFGLSRYLQDDTSDPTYTSSLGGKIPVRWTAPEAIAYRKFTSASDVWSYGIVMWEVMSFGERPYWDMSNQDVINAIEQDYRLPPPMDCPAALHQLMLDCWQKDRNSRPRFAEIVNTLDKMIRNPASLKTVATITAVPSQPLLDRSIPDFTAFTTVDDWLSAIKMVQYRDSFLTAGFTSLQLVTQMTSEDLLRIGITLAGHQKKILNSIHSMRVQISQSPTAMA

SEQ ID NO: 2943 - protein, 922 aa, Homo sapiens
MLKHLQVLDLHQCSLTADDVMSLTQVIPLLSNLQELDLSANKKMGSSSENLLSRLRFLPALKSLVINNCALESETFTALAEASVHLSALEVFNLSWNKCVGGNLKLLLETLKLSMSLQVLRLSSCSLVTEDVALLGVYLLVPKRSWQTEQWVQNLTLRSQKLGVLSSSQNGPPKSTSQTQSLTICHNKTTVTSSKISQRDPSPESNKKGESPSLESRSTAVTRTSSIHQLIAPASYSPIQPHSLIKHQQIPLHSPPSKVSHHQLILQQQQQQIQPITLQNSTQDPPPSQHCIPLQNHGLPPAPSNAQSQHCSPIQSHPSPLTVSPNQSQSAQQSVVVSPPPPHSPSQSPTIIIHPQALIQPHPLVSSALQPGPNLQQSTANQVQATAQLNLPSHLPLPASPVVHIGPVQQSALVSPGQQIVSPSHQQYSSLQSSPIPIASPPQMSTSPPAQIPPLPLQSMQSLQVQPEILSQGQVLVQNALVSEEELPAAEALVQLPFQTLPPPQTVAVNLQVQPPAPVDPPVVYQVEDVCEEEMPEESDECVRMDRTPPPPTLSPAAITVGRGEDLTSEHPLLEQVELPAVASVSASVIKSPSDPSHVSVPPPPLLLPAATTRSNSTSMHSSIPSIENKPPQAIVKPQILTHVIEGFVIQEGLEPFPVSRSSLLIEQPVKKRPLLDNQVINSVCVQPELQNNTKHADNSSDTEMEDMIAEETLEEMDSELLKCEFCGKMGYANEFLRSKRFCTMSCAKRYNVSCSKKFALSRWNRKPDNQSLGHRGRRPSGPDGAAREHILRQLPITYPSAEEDLASHEDSVPSAMTTRLRRQSERERERELRDVRIRKMPENSDLLPVAQTEPSIWTVDDVWAFIHSLPGCQDIADEFRAQEIDGQALLLLKEDHLMSAMNIKLGPALKICARINSLKES

SEQ ID NO: 2944 - protein, 311 aa, Homo sapiens
MDEGGPLNAEVPVKHSPEEFSLSRRPSSPPPASPSPGFQFGSCDSNSDFAPHPYSPSLPSPSPPSHRLHSNRQTWRWHQYRDTGSGSPGVVERCVPSEKDPAQFRDPGALAQALVVQLGHRRIAHDLRLLLLQHLWLGRTGQAPVVEYPICLVCLRPRSPSCPLPRYRTGPRLLAFPQLLPCVQGQESGPLRIGIGFGLRLPQGQARALHLLPEKRPKEAGPQGKATQACGHQLPASQPPAAQARADPVPGTPSQTRSFRSAGLQSPNSPRCFSGPPPRAPKQVTTSLKPRPCPGPKRPVSLELILQKSSV

SEQ ID NO: 2945 - protein, 221 aa, Homo sapiens
MSDFKGMYQVIQGIISPVNDTYGKKDLAASHHRVAMARLALQTSDWIRVDPWESEQAQWMETVKVLRHHHSKLLRSPPQMEGPDHGKALFSTPAAVPELKLLCGADVLKTFQTPNLWKDAHIQEIVEKFGLVCVGRVGHDPKGYIAESPILRMHQHNIHLAKEPVQNEISATYIRRALGQGQSVKYLIPDAVITYIKDHGLYTKGSTWKGKSTQSTEGKTS

SEQ ID NO: 2946 - protein, 109 aa, Homo sapiens
MWKAEEKTQLSLEGIGIDSFVEEGWLAEDPYTDKEGVDVPDKMKSRIPVVLLACGSFNPITNMHLRMFEVARDHLHQTGQSGGPESNRRTGGCHCTLQTLAIPLSMVTA

SEQ ID NO: 2947 - protein, 317 aa, Homo sapiens
MATICVCCLVVFAAARRALEEEQSVVVSPCCGLGHWGGGMLSRVPTMQPLHHLQKKPVKDCQEQQAMKWALPRAYQIGRLFWAPGSGAGDRKRMRKEGQRKGERRVKERARIGENEARPIRIFQLFLAAPCGWRKEILCTKTGRQRCSCGKDKAHSGAWYDLKVQCTFGAGHRNHSRGSITLASLISSKSIGTQDEELGKSSFTKAGQVGKWGQEAGLASAYKSPGHVTIREASFILIRNCPCPVFWGLEIFQRVHQEQPISPKKRQSCVCRQSKGEARDMLRFGGAQVFEVNVPMTRRRWPSEKSGAQPEPEVSDS

SEQ ID NO: 2948 - protein, 814 aa, Homo sapiens
MAPGCEHEKHMQGWLNPGLGVGQSYKVGERCPSSWQTRGGEEERGPERWTRCCREWKARPIANIRGSGAGYFLRPGGQVARETRGCEVRAAQHAAARNEPKRPPGNDTWPKFSLALVQSHVRITSFRVKTSMNQPPITHCAPQKAQERSSSLQPSASSVWGEELLAVSRSATPPSPRVQPVTFYYPALVGEEHLARVSAGPGGEFRLDFKAELSNLSAELSAATLCNEHAAEPGDAFATVPSAHKPFQVQSKGKRHFHNGGRALAGRKVQVSEVEPLSRQALHECLFVELDGMTLYAEHHSRVIQGEGTIRWAQWTDIAGRQTCEELKGKKGRVDCVIMTSLLCMHRGKESLGQARGSGPANAGPRLKYRHSERKEAAQHSPVGSIKSLIRESCPEGFRVEIADLTGYFKLNKEMLKAVRAVKKGEPGLKTGKSHEERGTQVKSMGKLVGHELKSGKLSQGKLGKPLAVSAERVGVMRNGEQIADLRENTWLLPFTLSELGHQSARCTLDSVVGRQSANHGEGKSADMLGSSHSALGGFANGVTSSYNRIAFSESISQLPFHAEDITNILTLAVYLRTGGTKICGVQDVSHVTQPKKALRPSHPCSQPQDGGTGRKHCEISASGGYAEETTPNWLQNEVNLEICSIKVSGSKCQWLSARSSEFPRSSVLQLSGVLTPTFKSFQVFLTKGHAGMIIPRKMQFREVKDVVYISGITFVSCMLLPNNATLQTCRDVGERESPLPGPCRSWGIKTTNHHLQLQIQPKQTWKEGPSMEQNQSPDSKGYERGCRMRIEDKGLSHIWREVKVKNNVCCQNY

SEQ ID NO: 2949 - protein, 1364 aa, Homo sapiens [sequence omitted]

SEQ ID NO: 2950 - protein, 675 aa, Homo sapiens
MHPLSHSDPGPAPLLSAALRAWKRIFWRQILLTLGLLGLFLYGLPKFRHLEALIPMGVCPSATMSQLRDNFTGALRPWARPEVLTCTPWGAPIIWDGSFDPDVAKQEARQQNLTIGLTIFAVGSGIPDRQTVQVIQQALHRQPSTAAQYLQQMYAAQQQHLMLQTAALQQQHLSSAQLQSLAAVQQASLVSNRQGSTSGSNVSAQAPAQSSSINLAASPAAAQLLNRAQSVNSAAASGIAQQAVLLGNTSSPALTASQAQMYLRAQMLIFTPTATVATVQPELGTGSPARPPTPAQVQNLTLRTQQTPAAAASGPTPTQPVLPSLALKPTPGGSQPLPTPAQSRNTAQASPAGAKPGIADSVMEPHKKGDGNSSVPGSMEGRAGLSRTVPAVAAHPLIAPGPVTPALPLQCPTANLHKPGGSQQCHPPTPDTGPQNGHPEGVPHTPQRRFQHTSAVILQLQPASPVPQQCVPDDWKEVAPGEKSVPETRSGPSPHQQAIVTAMPGGLPVPTSPNIQPSPAHEKPSTEQPLYSSSLWGPAVDGCDCVHEACAAATTRDWLVFDNMGAYTACHITYAMSRVAWEALRRQLMAAEQEDDVEGVCKPLSCGWEITDTLCVGPVFTPASIIARGLVSQVGKAVRVKQTPGGRFCFFGQCLLEQGWPRSIAVSSADSPGIP

SEQ ID NO: 2951 - protein, 554 aa, Homo sapiens
MAGASVKVAVRVRPFNSREMSRDSKCIIQMSGSTTTGQFVLGPLVQLQLLLPSQDQVVSAALSGDMNSHLVFRMWTMTAFPFTGAVHPSDMPSSIIYQDPETGGYSLEVSQRCQDLDTGSTAQLVKAIVNPKQPKETPKSFSFDYSYWSHTSPEDINYASQKQVYRDIGEEMLQHAFEGYNVCIFAYGQTGAGKSYTMMGKQEKDQQGIIPQARSGGRAGAALADGAGPAEAESSGPGTPESSPQRAGSQEGKASWLCEDLFSRINDTTNDNMSYSVEVGLPACRWPLGQGWESGVAGSAFLMQRVLMAAPTPSLRGPDGGPYPLTQGPSRQPPPPHSGVLMLAPIPSGVLVSYMEIYCERVRDLLNPKNKGNLRVREHPLLGPYVEDLSKLAVTSYNDIQDLMDSGNKARTVAATNMNETSSRSHAVFNIIFTQKRHDAETNITTEKVSKISLVDLAGSERADSTGAKGTRLKEGANINKSLTTLGKVISALAEMDSGPNKGEAGACGVGGAAERATCEAAWGDAGDCVRNRVGSRESVRGTGRNGVSQRGNA

SEQ ID NO: 2952 - protein, 556 aa, Homo sapiens
MGLAQPRLLSGPSQESPQTLGKESRGLRQQGTSVAQSGAQAPGRAHRCAHCRRHFPGWVALWLHTRRCQARLPLPCPECGRRFRHAPFLALHRQVHAAATPDLGFACHLCGQSFRGWVALVLHLRAHSAAKRPIACPKCERRFWRRKQLRAHLRRCHPPAPEARPFICGNCGRSFAQWDQLVAHKRVHVAEALEEAAAKALGPRPRGRPAVTAPRPGGDAVDRPFQCACCGKRFRHKPNLIAHRRVHTGERPHQCPECGKRFTNKPYLTSHRRIHTGEKPYPCKECGRRFRHKPNLLSHSKIHKRSEGSAQAAPGPGSPQLPAGPQESAAEPTPAVPLKPAQEPPPGAPPEHPQDPIEAPPSLYSCDDCGRSFRLERFLRAHQRQHTGERPFTCAECGKNFGKKTHLVAHSRVHSGERPFACEECGRRFSQGSHLAAHRRDHAPDRPFVCPDCGKAFRHKPYLAAHRRIHTGEKPYVCPDCGKAFSQKSNLVSHRRIHTGERPYACPDCDRSFSQKSNLITHRKSHIRDGAFCCAICGQTFDDEERLLAHQKKHDV

SEQ ID NO: 2953 - protein, 237 aa, Homo sapiens
MDSSGLKRKNDSRGARSPRPPGGCARQRPTEAGRDAEQPVWADRVRGGAAAAAGLGRARRGLAESDLLCFLTALMLLQMLWYVGRSSAHRRLFRLKDTHAGAGWLHRLEPPLRLQTLPSLQPQLQKPLLSFPGLKPYSGPTDPMREECLFHSPTCPSAFRDRPQASPHSPREASPTPFSSPLCRSDRTLPARTGFQCSCRHVCTLHSTGELCDPCLSVLEPPQGLAQVGVEKMRGDE

SEQ ID NO: 2954 - protein, 222 aa, Homo sapiens
MAGGKGERDRRHFLRQLRQRFDRLSRRRRVSVPPPEADSVLQNHSAQGLREPKISERAALSWLYLTTDLEMAFAGSKGPCSPRGGPTSHPHHYPCPGGAPVRNTGSEDGSGSSAAAPKATGQGGHRLPHWVKAARRTGRAIPGATGRSASLGPPGGSGRGLNRGVSGGFLKQARGRAGEGHSAILLAPESPNAQVSNVTSATYRSNLSGFPRPCSVVLPGGP

SEQ ID NO: 2955 - protein, 443 aa, Homo sapiens
MGESQEPFCKELHPIEPKDQKRVKTGSVRMCEGITVREKAKSHLPTFYVRVSKEALQKLPMRKNGGSEAKCVRKEKGQEKDLLLWQQLVKRRKPCMSLPCPVACTHRSIKVNEARVRDSSQRQRPRESPARASRERAPLQALAQGASQSWETAAPASPAAKQGRISSPRVAGGSGCTGRALLLAAGLQNSIRSLNPCDPPTILSHRPLQGMQTHQRLLTLPPQTCRSLHSPANCSLHLRPTPPHKPPPSRVSYLVAFPRGIPDAIGDSCGLIHVQRKLRGPDSLPSKLPRRVEGGDRAESGRARGEPPRCRLLCRGGKIRSPELEKEKQLLGPRREAGPAPAAPRALCPVLPPRETVQDAQDQKREQTQKELQGGGRATAARSPRPLISHQDLMVVETMQKAKGREPADAVHTAGVLTVIFAIQTFRAIRTGDSKRNACWGAQ

SEQ ID NO: 2956 - protein, 409 aa, Homo sapiens
MHDFPLPNNLIIHELACAFSVSLWFPFTTLASTWLQVATNSTPKRHPFSFCPCGKTYWYFLIQIPKRRNLIEYLLLCVKPYVIVQATEWPLGSVSIQGQSVMATGILDGVKRGYLGLPWVFYPGCGQAGQKSSHRPSITSILDKKPKEPDFPPGSKSPHIYCFGAKAPPPATPAHNPGLSSTAVLNAKCPARVPEIGMQERDYGPEAQLHLEALGVPKPWATSPSALPGEDSYRPRLPELRSRAEPPARVLRRALRKPGRAAVRELGRVGRAGTRASQSYMNSPCLGKLDDLCSLTKEETLSIFHRDLQTPKPTQIQTHLSTHRHSQALLEGAMEKEMRAAQEQVVRQSWLLGLSLPIPALHYDCHPFRRTSLKASESTPDTIRVQSVQLNKDLSSVFAVENIVVACYE

SEQ ID NO: 2957 - protein, 729 aa, Homo sapiens
MTIDLSPYTVILTVGCFESGSDISPCFSLEKEAPAFPPESPFTQRLLVTAVPTGVCRISVPAVKVFSPHRARNYLAQTEKARRNTAGKPMAFPGGYPGDCTHRSACSEKPLPSRPRSRAETRGSKENRLERTGSPASVQDTASGSRAFCSLLSEPRDVPRAPRPLFVSLFGVRGPRNRVLAVARTTGKLPSHPVGISEPAGALGMRFLMGLGSELRCHSRRSGPSLSFSYFGAESGYKGLKNTAVFEGLSLEDEPGLRGVDAFLASWSGLAGPTSGPEPAPTARELLRGETASGEAAAPALPHLHRSRPIRDVTDSAFLVPLQGSSGRMTEQGLGKPERLERSPWKRPGLRPGFEQPGGSREAERLVGSRDGSSRSLHSLHPVREPVPSLLSRIRGAAELPLPSSDPAFGTGAPPGQGSCPLKSLENGNHERFFHGGSSFYETFIQIDFSAPRGEGNGQGFQCTFCAVEPRGLSWTVVGSWGWRAGAGEGKSKSGERSRRAVDQTSRPERLVRRQRRDLPERARTMALYNPIPVKQNCFTVNRSLFVFSEDNVVRKYAKRITEWPPFEYMILATIIANCIVLALEQHLPDGDKTPMSERLDDTEPYFIGIFCFEAGIKIIALGFVFHKGSYLRNGWNVMDFVVVLTGRKAGLGCCGSGVESGGWGVSAWGVAPTEPVSASVSEALCWARDHCLLFSEPYGSEAQSPDGRGGSRPHSRRELSFQSPILTQ

SEQ ID NO: 2958 - protein, 504 aa, Homo sapiens
MKGTIANTRRITWKDESPRKPAQGLIRGHPFTQHQSLHQQLKERPPESRSLESWLQPRKALSTFLSTYTLPQLNTPLDPKSSLTLNSFSIGQGRTECYSTPLLLQKHQVTGPGGGNAAKRKEQGYSLHRDLAHFTPGCSRGPALTDKAGGTCRISPIPSLHCQLGGPMRFPMPSVRAERPGHGLCPEVQAAAGTPLIESCTRPTPAAPTWLPPRLGLGRRPSLGGRGCMSERQGEGKETQSGLQQRSHGCYLGYFIPPPSRTVPYPEETQLAGPAVFRVTHRSERVGKVDSVGPGTTAATATADSIIASLLMPPLLLHQPLPVCCPTCKPIDMLHFPPRTQIVPYAAWVALPSPFLLLSKVEGKADKGDFYNHTKKRQWGENIQCETSNGFEMKKASLCSITISQHWNTHGASGCSSTHYIYDIALQREVMWQLCAIKITEAIQYVVEFAKRIDGFMELCQNNQIVLLKAGCSDAQVCEHCTCRLELREQSEGETQTGDVGPEL

SEQ ID NO: 2959 - protein, 230 aa, Homo sapiens
MHSSSPSPTNDRGLRRTIRLAPLSFGLRFLTSCSLLLPRAAQILAAEAGLPSSRSFMGFAAPFTNKRKAYSERRIMGYSMQEMYEVVSNVQEYREFVPWCKKSLVVSSRKGHLKAQLEVGFPPVMERYTSAVSMVKPHMVKAVCTDGKLFNHLETIWRFSPGIPAYPRTCTVDFSISFEFRSLLHSQLATMFFDEVVKQNVAAFERRAATKFGPETAIPRELMFHEVHQT

SEQ ID NO: 2960 - protein, 111 aa, Homo sapiens
MGRGSGILSVAFWGTDSTRPSSCVVSADQALCGLEECRPLLLRPGPRASVMGAPQEGSDAGRGRFLGSEVRHSGPGAAFTPGVSFHFQLESAATPISCFPFPRSGRAPLPT

SEQ ID NO: 2961 - protein, 93 aa, Homo sapiens
MAPRPWLWASARWWGQAPCTAATCCSLPGYVRLPTPPSAVAPRAPPAPCHPLSCAFAGLGPRQEGGSSGSQSTQAARKQPMTSSDGIRGVRVD

SEQ ID NO: 2962 - protein, 47 aa, Homo sapiens
MWESGPGTCSPTRRQSPSCASSRAAARATATTALCAGTTRSITACAS

SEQ ID NO: 2963 - protein, 2237 aa, Homo sapiens
MLLLRAAVQPALAWEPEDTRGGVGRAGRPRSSSSQSCCPTCTPVGTRRHSWRRRQSRQTKEFIFSELLSNLHSRGNEKTLMEESAEQAQRRDETRVGRRRHSWRSRQSRQTKEFIFSELLSNLYSRRNLQTLVEESAEQAQRCDEMLLLRAAVQPALAWEREDTRGGVGRAGRPRSSSSQSCCPTCTRVGTRRHSWRRRQSRQTKEFIFSELLSNLHSRGNEKTLMEESAEQAQRRDETRVGRRRHSWRSRQSRQTKEFIFSELLSNLYSRGKEKTLVEASAEQADQGVHLLRAAVQPALAQTKEFIFSELLSNLHSRGNEKTLVEASAEQADQGVHLLRAAVQPALAWEREDTRGGVSREGRPRSSSSQSCCPTFTRAGTRRHSWRRRQSRQTKEFIFSELLSNLYSRGNEQTLVEASAEQADQGVHLLRAAVQPALARHSWRRRQSRQTKEFIFSELLSNLYSRGNEQTLVEASAEQADQGVHLLRAAVQPALARHSWRRRQSRQTKEFIFSELLSKLHSRGNERTLMEESAEQAQRCDETRVGRRRHSWRSRQSRPTKEFIFSELLSNLYSASEPADTRGGSRQTKEFIFSELLSNLYSRGNEKTLVEASAEQADQGVHLLRAAVQPVLAWEREDTRGGSRQTKEFIFSELLSNLHSRGNEKTLMEESAEQAQRRDETRVGRRRHSWRSRQSKHTKEFIFSELLSNLYSRRNLQTLVEESAEQAQRCCPTCTRVGTRRHSWRRRQSRQTKEFIFSELLSNLYSRGNEKTLVEASAEQADQGVHLLRAAVQPALAWEREDTRGGSRQTKEFIFSELLSKLHSRGNEKTLMEESAEQAQRCDETRVGRRRHSWRSRQSRPTKEFIFSELLSNLYSRRNLQTLVEESAEQAQRCDEMLLLRAAVQPALTWEREDTRGGSRQTKEFIFSELLSNLYSRGNEKTLVEASAEQADQGVHLLRAAVQPALAWEREDTRGGSRQTKEFIFSELLSKLHSRGNEKTVMEESAEQAQRCDETRVGRRRHSWRSRQSRPTKEFIFSELLSNLYSRRNLQTLVEESAEQAQRCDEMLLLRAAVQPALAWEQEDTRGGVGRAGRPRSSSSQSCCPTCTRVGTRRHSWRHRQSRQTKEFIFSELLSNLHSRGNEKTLMEESAEQAQRRDETRVGRRRHSWRSRQSRQIKEFIFSELLSNLYSRRNLQTLVEESAEQAQRCDEMLLLRAAVQPALAWEREDTRGGSRQTKEFIFSELLSNLYSRGNEKTHVEASAEQADQGLHLLRAAVQPALAWEREDTRGGSRQTKEFIFSELLSKLHLRGNEKTLMEESAEQAQRCDETRVGRRRHSWRSRQSRQTKEFIFSDLLSNLYSRRNLQTLVEESAEQSQRCDEMLLLRAAVQPALAWEQEDTRGGVGRAGRPRSSSSQSCCPTCTRVGTRRHSWRRRQSRQTKEFIFSELLSNLHSRGNEKTLIRRHSWRSRQSRQTKEFIFSELLSNLYSRRNLQTLVEESAEQAQRCDEMLLLRAAVQPALAWEREDTRGGVGRAGRPRSSFSQSCCPTCTPVGTRRHSWRCRQSRQTKEFIFSELLSKLHSRGNEKTLIYVTHLMKRIQRGPVRGISIKLQEEERERRDNYVPEVSALDQEIIEVDPDTKEMLKLLVAQEAVPPADIVFSVKSPPSAGYLVMVLRGILADEPPSLDPVQSFSQEAVDTGRILYLHSRPEARSHAFSLDVASAWVLPLEDVTWSWRSYFPTLPGLGLQVLEPPRHGALQKEDGPQARTLSTFCWREKLGYDKLAEALRVGAVNEATCTWSGQLPPRNYKNPIYSCKVFLGGVPWDITEAGLVNTFRVFGSLSVEWPGKDGKHPRCPPKGPTYQIWVTGPPSAARNRRQARGLPGDQGPSVASPSRTVPRGEPLTGDQQAALLPPGGCRRRETRPKRTSGVQWRKVRHGKAWPEHCDFSEAPSTPLSFPGLKVEFRQRIQGQISIKVSQPPEHGAFKFPVSQRLRAIYRYVLKAYHLNMTSNFLLNFGCSNQREIWPSVVFTGIPRTHFPQNWGNPRKAPTAHTPRWYVPYVILGSQTQAMASIYQTHTVCQALLLTLTLSPQLQQSLLRSAGLLCVRKGPSASLVMGLAEEDVRSGVIKSSSLILEMQCVFKWIGFTKQWMIVLHKLLWTQQQVGANQGTLPSAIVEAFPGAFGFWLQSKVKDNWNEVPPTLTKEHGATSHQKPTLRLTKKSKLVLQLLTSGPANQL

SEQ ID NO: 2964 - protein, 1154 aa, Homo sapiens
MAPQMYEFHLPLSPEELLKSGGVNQYVVQEVLSIKHLPPQLRAFQAAFRAQGPLAMLQHFDTIYSILHHFRSIDPGLKEDTLQFLIKVVSRHSQELPAILDDTTLSGSDRNAHLNALKMNCYALIRLLESFETMASQTNLVDLDLGGKGKKARTKAAHGFDWEEERQPILQLLTQLLQLDIRHLWNHSIIEEEFVSLVTGCCYRLLENPTINHQKNRPTREAITHLLGVALTRYNHMLSATVKIIQMLQHFEHLAPVLVAAVSLWATDYGMKSIVGEIVREIGQKCPQELSRDPSGTKGFAAFLTELAERVPAILMSSMCILLDHLDGENYMMRNAVLAAMAEMVLQVLSGDQLEAAARDTRDQFLDTLQAHGHDVNSFVRSRVLQLFTRIVQQKALPLTRFQAVVALAVGRLADKSVLVCKNAIQLLASFLANNPFSCKLSDADLAGPLQKETQKLQEMRAQRRTAAASAVLDPEEEWEAMLPELKSTLQQLLQLPQGEEEIPEQIANTETTEDVKGRIYQLLAKASYKKAIILTREATGHFQESEPFSHIDPEESEETRLLNILGLIFKGPAASTQEKNPRESTGNMVTGQTVCKNKPNMSDPEESRGNDELVKQEMLVQYLQDAYSFSRKITEAIGIISKMMYENTTTVVQEVIEFFVMVFQFGVPQALFGVRRMLPLIWSKEPGVREAVLNAYRQLYLNPKGDSARAKAQALIQNLSLLLVDASVGTIQCLEEILCEFVQKDELKPAVTQLLWERATEKVACCPLERCSSVMLLGMMARGKPEIVGSNLDTLVSIGLDEKFPQDYRLAQQVCHAIANISDRRKPSLGKRHPPFRLPQEHRLFERLRETVTKGFVHPDPLWIPFKEVAVTLIYQLAEGPEVICAQILQGCAKQALEKLEEKRTSQEDPKESPAMLPTFLLMNLLSLAGDVALQQLVHLEQAVSGELCRRRVLREEQEHKTKDPKEKNTSSETTMEEELGLVGATADDTEAELIRGICEMELLDGKQTLAAFVPLLLKVCNNPGLYSNPDLSAAASLALGKFCMISATFCDSQLRLLFTMLEKSPLPIVRSNLMVATGDLAIRFPNLVDPWTPHLYARSPGPCSASAENSGAGDDPPDPQGHGEGEGAGQRDGGAAHRPRASDCCPGQELLQ

SEQ ID NO: 2965 - protein, 137 aa, Homo sapiens
MQCGLVGKIIKRFEQKGFRLVAMKFLPASEEHLKQHYIDLKDRPFFPGLVKYMNSGPVVAMVWEGLNVVKTGRVMLGETNPADSKPGTIRGDFCIQVGRNIIHGSDSVKSAEKEISLRFKPEELVDYKSCAHDWVYE

SEQ ID NO: 2966 - protein, 131 aa, Homo sapiens
MEDGTGHRAVGLACRPRTLTVCCPGGASQAQHLGSIGCLREVEGGSPAVVLLDVPHGVGSSGGLQQCHRAATEATARHAAAINPRHSKRSLHQLVQLWAAHLIVVSAERILKGWAWAGLCPAGAGRPEGLT

SEQ ID NO: 2967 - protein, 116 aa, Homo sapiens [sequence omitted]

SEQ ID NO: 2968 - protein, 171 aa, Homo sapiens
MDTEKHNETSPHQTLDTYLSQERSSPGVGDIFETKRVGLHRRLPPVCTDQTLIGLYIYHGELRTSKQAWAAASAEEALPSPPPPGPCRVCGGGRGYLDIFISRELDRERIARFPPDGATSRRPQGPRAGRWVRFPAVLLWPPWRSFYDTLPVFPDIIPHRSVLPTSRSSRP

SEQ ID NO: 2969 - protein, 574 aa, Homo sapiens
MASTEGANNMPKQVEVRMHDSHLGSEEPKHRHLGLRLCDKLGKNLLLTLTVFGVILGAVCGGLLRLASPIHPDVVMLIAFPGDILMRMLKMLILPLIISSLITGLSGLDAKASGRLGTRAMVYYMSTTIIAAVLGVILVLAIHPGNPKLKKQLGPGKKNDEVSSLDAFLDLIRNLFPENLVQACFQQIQTVTKKVLVAPPPDEEANATSAVVSLLNETVTEVPEETKMVIKKGLEFKDGMNVLGLIGFFIAFGIAMGKMGDQAKLMVDFFNILNEIVMKLVIMIMWYSPLGIACLICGKIIAIKDLEVVARQLGMYMVTVIIGLIIHGGIFLPLIYFVVTRKNPFSFFAGIFQAWITALGTASSAGTLPVTFRCLEENLGIDKRVTRFVLPVGATINMDGTALYEAVAAIFIAQMNGVVLDGGQIVTVSLTATLASVGAASIPSAGLVTMLLILTAVGLPTEDISLLVAVDWLLDRMRTSVNVVGDSFGAGIVYHLSKSELDTIDSQHRVHEDIEMTKTQSIYDDMKNHRESNSNQCVYAAHNSVIVDECKVTLAANGKSADCSVEEEPWKREK

SEQ ID NO: 2970 - protein, 106 aa, Homo sapiens
MPARKGALWPRPRSCGTAGSGAEGSRGQLSPQRTGKGTLSRPGLPLYLCWGLVVRLRSSELLGVAGAAIPSSRRRAQGAARGAGTPGQRRALAQPRGCCWPSRLQG

SEQ ID NO: 2971 - protein, 234 aa, Homo sapiens
MTEMEQLYLFDDFSRWMMLKNLTKQGRIKHPNPNAHPRPTSQDLAGFWDMLQLSIENISMKFDELHQLKANNWKQMDPLDKKNPNAHPRPTSQDLAGFWDMLQLSIENISMKFDELHQLKANNWKQMDPLDKKETSLIFYQPHLTAVDCIARTQASFQTVILNELDDDSYFLVDTELRTLSCLADGKQAHPALWRGGAEESPLPVHSGHTGETCKSGLAVQIRAHCQAGSIGQA

SEQ ID NO: 2972 - protein, 386 aa, Homo sapiens
MAARHLGAPGALAAVLGTPALPRRRSRPLMNFDRPANSGRRLKEYGIPNSHLVRLGKLAVSEKLATSQPHSSSSPDRAHAHSPWTLERRLGISFLLLSSRDRAALWKPSHSIIAEDPPPRHSEKVPLRPWPGRGARRKRESPRPRPPPLCPLSAAASEQPRAALHSERGARRRQLGSGFGLRGDRAAAPPTARAPMSNSRNNRVMVEGVGARVVRGPDWKWGKQDGGEGHVGTVRSFESPEEVVVVWDNGTAANYRCSGAYDLRILDSAPTGKPRPPGQGLRARGEGASCGGRRCRGERSAVGHLVGSARLERAERQSAKGILGSERVNKHFQKRPSTPKGNDGSTITGMLSSLEDTKHREENRHRSPNPTPPLGKGSGEAYLISH

SEQ ID NO: 2973 - protein, 636 aa, Homo sapiens
MERAGLQRKGGIKKRAWPLDFLMPGSWDGPPGLHRRTGRPSGDGEMLPGVSRLHTARVLVLGDDRMLGRLAQAYHRLRLSLQLYYIPVLAPEKPAASRQPELGELATFLGRVDPWYQSNVNTLCPAIHKLAEMPPSLDTSRTVDPFILDVITYYIRMGTQPIYFQIYTVKIFFSDLSQDPTEDIFLIELKVKIQDSKFPKDGFSPRRRGVAEGPGAELSLCYQKALLSHRPREVTVSLRATGLILKAIPASDTEGAGETTQVTVALVPAREGGKSSQSWNSSAERRDWLPLPQTCPPAPPSPPAGPKPRFRRGGLTSPYSLGVAGAPRWCPSGHCHGPARVCFFRGLAGQSRGCFSDALRPRGRDPEDVGPGAHLADAAGPPGGWRGRLRGSAPPAGGAQAGQMLRLAARLQLGRGGPDGHPNRRESPLERGSAPGGDCRVRSPARSSGELSVSVGIRALVPSEPGSHGSARFTKGPRLITPVLENMTFCVLISLDYPQHSSLWEEAVVRSKLGVVMDNENCVEDTGSDSLSPRNSQPQFRNFRLGDFEAASLALVHCDYRRNSNVQEAHVSREVLLTSHKKQLMTDSDGNERVKGVGGSQGLVAQASPASEKNLGRARESLGMPGRLAHQNSTSA

SEQ ID NO: 2974 - protein, 501 aa, Homo sapiens
MEKGIQFSPSQLQPRLREELGKAGVTLPRFAGVGVGEGGRGTEEGKEEETEYLSYCISKAKAFSKAPPGNVCSRVLDWSCDNDGACQPRAPATSADRAAMGIDELVILAMRRAGTHSRSTFPGLKSLLGVAVAGTVQDRDLLLIGFNALRLALSVWAENLHNDTNVDGHICVAVEIKSLCPPWYEYASSIYSYWGSVHLQRSSYQSSPPLLERWAEAQSDCVGECDMFLVDAYCEGCLGLEPSEVLNQLEECEMEREDKMQKESLWPRAGAEGVIKPTFPSPGNENICLSVLLTAKPRGLVQHHCWAFLLLTSSESKDTWQSLPSEMFPLAEPCPESRRLARAEGIGMALTLWVPHRVQGIFTVDLGGTWSSGSLTLSNQWGSRERVQGTFPNGRKAKPSFQEAEQTSQEEATGSLALWATEEVLGIRVQCRLSGSNLPYNACSSHLLGLMLVLIFGEYNVPIHAKKNSERKGDLKQKQKQKTTLFFMAGGSLSTSLLEGD

SEQ ID NO: 2975 - protein, 93 aa, Homo sapiens
MKRQGKVVPEPMRCIYGEGYVRSCDAEEHSYFQATAGQEGNHHDFVPFRIGISSVKQKQSQNEGSSGVMGTADDIKSLKLRIVNCLWVGLESS

SEQ ID NO: 2976 - protein, 217 aa, Homo sapiens
METIWIYQFRLIVIGDSTVGKSCLLHRFTQGRFPGLRSPACDPTVGVDFFSRLLEIEPGKRIKLQLWDTAGQERFRSITRSYYRNSVGGFLVFDITNRRSFEHVKDWLEEAKMYVQPFRIVFLLVGHKCDLASQRQVTREEAEKLSADCGMKYIETSAKDATNVEESFTILTRDIYELIKKGEICIQDGWEGVKSGFVPNTVHSSEEAVKPRKECFC

SEQ ID NO: 2977 - protein, 728 aa, Homo sapiens
MCASVKYNIRGPALIPRMKTKHRIYYITLFSIVLLGLIATGVFQFWPHSIESSNDWNVEKRSIRDVPVVRLPADSPIPERGDLSCRMHTCFDVYRCGFNPKNKIKVYIYALKKYVDDFGVSVSNTISREYNELLMAISDSDYYTDDINRACLFVPSIDVLNQNTLRIKETAQAMAQLSRWDRGTNHLLFNMLPGGPPDYNTALDVPRDRALLAGGGFSTWTYRQGYDVSIPVYSPLSAEVDLPEKGPGPRQYFLLSSQVGLHPEYREDLEALQVKHGESVLVLDKCTNLSEGVLSVRKRCHKHQVFDYPQVLQEATFCVVLRGARLGQAVLSDVLQAGCVPVVIADSYILPFSEVLDWKRASVVVPEEKMSDVYSILQSIPQRQIEEMQRQLFMEPARRENWSAANHQMNSLIWPREQWDSQIINDRIYPYAAISYEEWNDPPAVKWGSVSNPLFLPLIPPQSQGFTAIVLTYDRVESLFRVITEVSKVPSLSKLLVVWNNQNKNPPEDSLWPKIRVPLKVVRTAENKLSNRFFPYDEIETEAVLAIDDDIIMLTSDELQFGYEVWREFPDRLVGYPGRLHLWDHEMNKWKYESEWTNEVSMVLTGAAFYHKYFNYLYTYKMPGDIKNWVDAHMNCEDIAMNFLVANVTGKAVIKVTPRKKFKCPECTAIDGLSLDQTHMVERSECINKFASVFGTMPLKVVEHRADPVLYKDDFPEKLKSFPNIGSL

SEQ ID NO: 2978 - protein, 122 aa, Homo sapiens
MNLRLHSALLRLSSANACLLRLGSLRLSESAPVVASAPLRLRSAHDHLSLSSPRLRSAGCRPLGLGSLRLSSAYSPLGVGFLRLRSAATRKSFHGVRAAGSTDCHGAAAGVRATAGAGTARH

SEQ ID NO: 2979 - protein, 131 aa, Homo sapiens
MASPRSQTKELEFDLEGDGEPTGALKQRIGRVSQCCGNIIWVMGMEEKSEGESIHASWLDKVERAQTLELDVGLSPDSATHQLFDPGLCPDGLSHVADGGMSQCPSKGEPAPAGRSSSPAQAGAELGTNQD

SEQ ID NO: 2980 - protein, 91 aa, Homo sapiens
MSVPLPLKIQVIDCFTYYIRKGYEEALRLAKSSVAASTFLATAAYVHPFVVQNRFLPLLNTLGVYGFRRLTHSPAVFDKAPRQLPFYPERF

SEQ ID NO: 2981 - protein, 289 aa, Homo sapiens
MGSMVAGCIRGSGEGVRPSRLQPRSILWLQRSRRHLPSPRPPRRSAPSTLHPTPGSPGKAAPPGRARLRVLAQVPDDGRVPAGTVRIDWGLGETKAPKGPSLPNVFFRRLDGSPQAFHFQCTMKKRAREPKMGRSIGNVKTKPGAIPDGCASSLSLAFPDLPPIPQRLQQPLPLGTEVCCKGLLSQCWREKVTEVDGSLEGSHLPSPQLGMEPLAHGTIMEPHIHSVLALWLPRCLFFSINSERHSIGEDAGFEPRISDSKTHILNHKAMCPGHKHTPGAEMETTDSNV

SEQ ID NO: 2982 - protein, 339 aa, Homo sapiens [sequence omitted]

SEQ ID NO: 2983 - protein, 432 aa, Homo sapiens [sequence omitted]

SEQ ID NO: 2984 - protein, 938 aa, Homo sapiens
FPPYFPALHRFILLYQARRVEDEAQGRELVFALWQQLGAVLKDITPEGLEILLPFVLSLMSEEHTAVYTAWYLFEPVAKALGPKNANKYLLKPLIGAYESPCQLHGRFYLYTDCFVAQLMVRLGLQAFLTHLLPHVLQVLAGAEASQEESKDLAGAAEEESGLPGAGPGSCAFGEEIPMDGEPPASSGLGLPDYTSGVSFHDQADLPETEDFQAGLYVTESPQPQEAEAVSLGRLSDKSSTSETSLGEERAPDEGGAPVDKSSLRSGDSSQDLKQSEGSEEEEEEEDSCVVLEEEEGEQEEVTGASELTLSDTVLSMETVVAGGSGGDGEEEEEALPEQSEGKEQKILLDTACKMVRWLSAKLGPTVASRHVARNLLRLLTSCYVGPTRQQFTVSSGESPPLSAGNIYQKRPVLGDIVSGPVLSCLLHIARLYGEPVLTYQYLPYISYLVAPGSASGPSRLNSRKEAGLLAAVTLTQKIIVYLSDTTLMDILPRISHEVLLPVLSFLTSLVTGFPSGAQARTILCVKTISLIALICLRIGQEMVQQHLSEPVATFFQVFSQLHELRQQDLKLDPAGRGEGQLPQVVFSDGQQRPVDPALLDELQKVFTLEMAYTIYVPFSCLLGDIIRKIIPNHELVGELAALYLESISPSSRNPASVEPTMPGTGHEWDPHGGGCPQDDGHSGTFGSVLVGNRIQIPNDSRPENPGPLGPISGVGGGGLGSGSDDNALKQELPRSVHGLSGNWLAYWQYEIGVSQQDAHFHFHQIRLQSFPGHSGAVKCVAPLSSEDFFLSGSKDRTVRLWPLYNYGDGTSETAPRLVYTQHRKSVFFVGQLEAPQHVVSCDGAVHVWDPFTGKTLRTVEPLDSRVPLTAVAVMPAPHTSITMASSDSTLRFVDCRKPGLQVRGVQFPEHSPGSLGTWQGGETPQKQKARMLFWGPS

SEQ ID NO: 2985 - protein, 1079 aa, Homo sapiens [sequence omitted]

SEQ ID NO: 2986 - protein, 960 aa, Homo sapiens
MWRLRRAAVACEVCQSLVKHSSGIKGSLPLQKLHLVSRSIYHSHHPTLKLQRPQLRTSFQQFSSLTNLPLRKLKFSPIKYGYQPRRNFWPARLATRLLKLRYLILGSAVGGGYTAKKTFDQWKDMIPDLSEYKWIVPDIVWEIDEYIDFEKIRKALPNSEDLVKLAPDFDKIVESLSLLKDFFTSGSPEETAFRATDRGSESDKHFRKVSDKEKIDQLQEELLHTQLKYQRILERLEKENKELRKLVLQKDDKGIHHRKLKKSLIDMYSEVLDVLSDYDASYNTQDHLPRVVVVGDQSAGKTSVLEMIAQARIFPRGSGEMMTRSPVKVTLSEGPHHVALFKDSSREFDLTKEEDLAALRHEIELRMRKNVKEGCTVSPETISLNVKGPGLQRMVLVDLPGVINTVTSGMAPDTKETIFSISKAYMQNPNAIILCIQDGSVDAERSIVTDLVSQMDPHGRRTIFVLTKVDLAEKNVASPSRIQQIIEGKLFPMKALGYFAVVTGKGNSSESIEAIREYEEEFFQNSKLLKTSMLKAHQVTTRNLSLAVSDCFWKMVRESVEQQADSFKATRFNLETEWKNNYPRLRELDRNELFEKAKNEILDEVISLSQVTPKHWEEILQQSLWERVSTHVIENIYLPAAQTMNSGTFNTTVDIKLKQWTDKQLPNKAVEVAWETLQEEFSRFMTEPKGKEHDDIFDKLKEAVKEESIKRHKWNDFAEDSLRVIQHNALEDRSISDKQQWDAAIYFMEEALQARLKDTENAIENMVGPDWKKRWLYWKNRTQEQCVHNETKNELEKMLKCNEEHPAYLASDEITTVRKNLESRGVEVDPSLIKDTWHQVYRRHFLKTALNHCNLCRRGFYYYQRHFVDSELECNDVVLFWRIQRMLAITANTLRQQLTNTEVRRLEKNVKEVLEDFAEDGEKKIKLLTGKRVQLAEDLKKVREIQEKLDAFIEALHQEK

SEQ ID NO: 2987 - protein, 997 aa, Homo sapiens
MWRLRRAAVACEVCQSLVKHSSGIKGSLPLQKLHLVSRSIYHSHHPTLKLQRPQLRTSFQQFSSLTNLPLRKLKFSPIKYGYQPRRNFWPARLATRLLKLRYLILGSAVGGGYTAKKTFDQWKDMIPDLSEYKWIVPDIVWEIDEYIDFEKIRKALPNSEDLVKLAPDFDKIVESLSLLKDFFTSGSPEETAFRATDRGSESDKHFRKGLLGELILLQQQIQEHEEEARRAAGQYSTSYAQQKRKVSDKEKIDQLQEELLHTQLKYQRILERLEKENKELRKLVLQKDDKGIHHRKLKKSLIDMYSEVLDVLSDYDASYNTQDHLPRVVVVGDQSAGKTSVLEMIAQARIFPRGSGEMMTRSPVKVTLSEGPHHVALFKDSSREFDLTKEEDLAALRHEIELRMRKNVKEGCTVSPETISLNVKGPGLQRMVLVDLPGVINTVTSGMAPDTKETIFSISKAYMQNPNAIILCIQDGSVDAERSIVTDLVSQMDPHGRRTIFVLTKVDLAEKNVASPSRIQQIIEGKLFPMKALGYFAVVTGKGNSSESIEAIREYEEEFFQNSKLLKTSMLKAHQVTTRNLSLAVSDCFWKMVRESVEQQADSFKATRFNLETEWKNNYPRLRELDRNELFEKAKNEILDEVISLSQVTPKHWEEILQQSLWERVSTHVIENIYLPAAQTMNSGTFNTTVDIKLKQWTDKQLPNKAVEVAWETLQEEFSRFMTEPKGKEHDDIFDKLKEAVKEESIKRHKWNDFAEDSLRVIQHNALEDRSISDKQQWDAAIYFMEEALQARLKDTENAIENMVGPDWKKRWLYWKNRTQEQCVHNETKNELEKMLKCNEEHPAYLASDEITTVRKNLESRGVEVDPSLIKDTWHQVYRRHFLKTALNHCNLCRRGFYYYQRHFVDSELECNDVVLFWRIQRMLAITANTLRQQLTNTEVRRLEKNVKEVLEDFAEDGEKKIKLLTGKRVQLAEDLKKVREIQEKLDAFIEALHQEK

SEQ ID NO: 2988 - protein, 735 aa, Homo sapiens
VRILVLCGTRRGWTETVPTLECGAGGPRGHSLCRLGGPSGTESVTLSGTAPGWEPPDDPDTGSECSHPEVSPSPRFVAAKTQTNQSGKKAPASVVRCATLLHRTPPATQTQTFRTPNSGSPASKATAAESAFSRRVEGKAQNHFEETNSSSQNSSETASPLISNPFPLLQKPYTCGACGIQFQFYNNLLEHMQSHAADNENNIASNQSRSPPAVVEEKWKPQAQRNSANNTTTSGLTPNSMIPEKERQNIAERLLRVMCADLGALSVVSGKEFLKLAQTLVDSGARYGAFSVTEILGNFNTLALKHLPRMYNQVKVKVTCALGSNACLGIGVTCHSQSVGPDSCYILTAYQAEGNHIKSYVLGVKGADIRDSGDLVHHWVQNVLSEFVMSEIRTVYVTDCRVSTSAFSKAGMCLRCSACALNSVVQSVLSKRTLQARSMHEVIELLNVCEDLAGSTGLAKETFGSLEETSPPPCWNSVTDSLLLVHERYEQICEFYSRAKKMNLIQSLNKHLLSNLAAILTPVKQAVIELSNESQPTLQLVLPTYVRLEKLFTAKANDAGTVSKLCHLFLEALKENFKVHPAHKVAMILDPQQKLRPVPPYQHEEIIGKVCELINEVKESWAEEADFEPAAKKPRSAAVENPAAQEDDRLGKNEVYDYLQEPLFQATPDLFQYWSCVTQKHTKLAKLAFWLLAVPAVGARSGCVNMCEQALLIKRRRLLSPEDMNKLMFLKSNML

SEQ ID NO: 2989 - protein, 830 aa, Homo sapiens
QAVRGGQARARRALGPLLPTAMEDEQPDSLEGWVPVREGLFAEPERHRLRFLVAWNGAEGKFAVTCHDRTAQQRRLREGARLGPEPEPKPEAAVSPSSWAGLLSAAGLRGAHRQLAALWPPLERCFPRLPPELDVGGGGAWGLGLGLWALLWPTRAGPGEAALQELCGQLERYLGAAADGCGGATVRDALFPAEGGAADCESPREFRERALRARWVEADARLRQVIQGHGKANTMVALMNVYQEEDEAYQELVTVATMFFQYLLQPFRAMREVATLCKLDILKSLDEDDLGPRRVVALEKEAEEWTRRAEEAVVSIQDITVNYFKETVKALAGMQKEMEQDAKRFGQAAWATAIPRLEKLQLMLARETLQLMRAKELCLNHKRAEIQGKMEDLPEQEKNTNVVDELEIQFYEIQLELYEVKFEILKNEEILLTTQLDSLKRLIKEKQDEVVYYDPCENPEELKVIDCVVGLQDDKNLEVKELRRQCQQLESKRGRICAKRASLRSRKDQCKENHRFRLQQAEESIRYSRQHHSIQMKRDKIKEEEQKKKEWINQERQKTLQRLRSFKDKRLAQSVRNTSGSEPVAPNLPSDLSQQMCLPASHAVSVIHPSSRKTRGVPLSEAGNVKSPKCQNCHGNIPVQVFVPVGDQTHSKSSEELSLPPPPPPPPPPPPPPPPPPPPLRALSSSSQAATHQNLGFRAPVKDDQPRPLVCESPAERPRDSLESFSCPGSMDEVLASLRHGRAPLRKVEVPAVRPPHASINEHILAAIRQGVKLKKVHPDLGPNPSSKPTSNRRTSDLERSIKAALQRIKRVSADSEEDSDEQDPGQWDG

SEQ ID NO: 2990 - protein, 1273 aa, Homo sapiens; identical to SEQ ID NO: 231

SEQ ID NO: 2991 - protein, 4624 aa, Homo sapiens
MFRIGRRQLWKHSVTRVLTQRLKGEKEAKRALLDARHNYLFAIVASCLDLNKTEVEDAILEGNQIERIDQLFAVGGLRHLMFYYQDVEEAETGQLGSLGGVNLVSGKIKKPKVFVTEGNDVALTGVCVFFIRTDPSKAITPDNIHQEVSFNMLDAADGGLLNSVRRLLSDIFIPALRATSHGWGELEGLQDAANIRQEFLSSLEGFVNVLSGAQESLKEKVNLRKCDILELKTLKEPTDYLTLANNPETLGKIEDCMKVWIKQTEQVLAENNQLLKEADDVGPRAELEHWKKRLSKFNYLLEQLKSPDVKAVLAVLAAAKSKLLKTWREMDIRITDATNEAKDNVKYLYTLEKCCDPLYSSDPLSMMDAIPTLINAIKMIYSISHYYNTSEKITSLFVKVTNQIISACKAYITNNGTASIWNQPQDVVEEKILSAIKLKQEYQLCFHKTKQKLKQNPNAKQFDFSEMYIFGKFETFHRRLAKIIDIFTTLKTYSVLQDSTIEGLEDMATKYQGIVATIKKKEYNFLDQRKMDFDQDYEEFCKQTNDLHNELRKFMDVTFAKIQNTNQALRMLKKFERLNIPNLGIDDKYQLILENYGADIDMISKLYTKQKYDPPLARNQPPIAGKILWARQLFHRIQQPMQLFQQHPAVLSTAEAKPIIRSYNRMAKVLLEFEVLFHRAWLRQIEEIHVGLEASLLVKAPGTGELFVNFDPQILILFRETECMAQMGLEVSPLATSLFQKRDRYKRNFSNMKMMLAEYQRVKSKIPAAIEQLIVPHLAKVDEALQPGLAALTWTSLNIEAYLENTFAKIKDLELLLDRVNDLIEFRIDAILEEMSSTPLCQLPQEEPLTCEEFLQMTKDLCVNGAQILHFKSSLVEEAVNELVNMLLDVEVLSEEESEKISNENSVNYKNESSAKREEGNFDTLTSSINARANALLLTTVTRKKKETEMLGEEARELLSHFNHQNMDALLKVTRNTLEAIRKRIHSSHTINFRDSNSASNMKQNSLPIFRASVTLAIPNIVMAPALEDVQQTLNKAVECIISVPKGVRQWSSELLSKKKIQERKMAALQSNEDSDSDVEMGENELQDTLEIASVNLPIPVQTKNYYKNVSENKEIVKLVSVLSTIINSTKKEVITSMDCFKRYNHIWQKGKEEAIKTFITQSPLLSEFESQILYFQNLEQEINAEPEYVCVGSIALYTADLKFALTAETKAWMVVIGRHCNKKYRSEMENIFMLIEEFNKKLNRPIKDLDDIRIAMAALKEIREEQISIDFQVGPIEESYALLNRYGLLIAREEIDKVDTLHYAWEKLLARAGEVQNKLVSLQPSFKKELISAVEVFLQDCHQFYLDYDLNGPMASGLKPQEASDRLIMFQNQFDNIYRKYITYTGGEELFGLPATQYPQLLEIKKQLNLLQKIYTLYNSVIETVNSYYDILWSEVNIEKINNELLEFQNRCRKLPRALKDWQAFLDLKKIIDDFSECCPLLEYMASKAMMERHWERITTLTGHSLDVGNESFKLRNIMEAPLLKYKEEIEDICISAVKERDIEQKLKQVINEWDNKTFTFGSFKTRGELLLRGDSTSEIIANMEDSLMLLGSLLSNRYNMPFKAQIQKWVQYLSNSTDIIESWMTVQNLWIYLEAVFVGGDIAKQLPKEAKRFSNIDKSWVKIMTRAHEVPSVVQCCVGDETLGQLLPHLLDQLEICQKSLTGYLEKKRLCFPRFFFVSDPALLEILGQASDSHTIQAHLLNVFDNIKSVKFHEKIYDRILSISSQEGETIELDKPVMAEGNVEVWLNSLLEESQSSLHLVIRQAAANIQETGFQLTEFLSSFPAQVGLLGIQMIWTRDSEEALRNAKFDKKIMQKTNQAFLELLNTLIDVTTRDLSSTERVKYETLITIHVHQRDIFDDLCHMHIKSPMDFEWLKQCRFYFNEDSDKMMIHITDVAFIYQNEFLGCTDRLVITPLTDRCYITLAQALGMSMGGAPAGPAGTGKTETTKDMGRCLGKYVVVFNCSDQMDFRGLGRIFKGLAQSGSWGCFDEFNRIDLPVLSVAAQQISIILTCKKEHKKSFIFTDGDNVTMNPEFGLFLTMNPGYAGRQELPENLKINFRSVAMMVPDRQIIIRVKLASCGFIDNVVLARKFFTLYKLCEEQLSKQVHYDFGLRNILSVLRTLGAAKRANPMDTESTIVMRVLRDMNLSKLIDEDEPLFLSLIEDLFPNILLDKAGYPELEAAISRQVEEAGLINHPPWKLKVIQLFETQRVRHGMMTLGPSGAGKTTCIHTLMRAMTDCGKPHREMRMNPKAITAPQMFGRLDVATNDWTDGIFSTLWRKTLRAKKGEHIWIILDGPVDAIWIENLNSVLDDNKTLTLANGDRIPMAPNCKIIFEPHNIDNASPATVSRNGMVFMSSSILDWSPILEGFLKKRSPQEAEILRQLYTESFPDLYRFCIQNLEYKMEVLEAFVITQSINMLQGLIPLKEQGGEVSQAHLGRLFVFALLWSAGAALELDGRRRLELWLRSRPTGTLELPPPAGPGDTAFDYYVAPDGTWTHWNTRTQEYLYPSDTTPEYGSILVPNVDNVRTDFLIQTIAKQGKAVLLIGEQGTAKTVIIKGFMSKYDPECHMIKSLNFSSATTPLMFQRTIESYVDKRMGTTYGPPAGKKMTVFIDDVNMPIINEWGDQVTNEIVRQLMEQNGFYNLEKPGEFTSIVDIQFLAAMIHPGGGRNDIPQRLKRQFSIFNCTLPSEASVDKIFGVIGVGHYCTQRGFSEEVRDSVTKLVPLTRRLWQMTKIKMLPTPAKFHYVFNLRDLSRVWQGMLNTTSEVIKEPNDLLKLWKHECKRVIADRFTVSSDVTWFDKALVSLVEEEFGEEKKLLVDCGIDTYFVDFLRDAPEAAGETSEEADAETPKIYEPIESFSHLKERLNMFLQLYNESIRGAGMDMVFFADAMVHLVKISRVIRTPQGNALLVGVGGSGKQSLTRLASFIAGYVSFQITLTRSYNTSNLMEDLKVLYRTAGQQGKGITFIFTDNEIKDESFLEYMNNVLSSGEVSNLFARDEIDEINSDLASVMKKEFPRCLPTNENLHDYFMSRVRQNLHIVLCFSPVGEKFRNRALKFPALISGCTIDWFSRWPKDALVAVSEHFLTSYDIDCSLEIKKEVVQCMGSFQDGVAEKCVDYFQRFRRSTHVTPKSYLSFIQGYKFIYGEKHVEVRTLANRMNTGLEKLKEASESVAALSKELEAKEKELQVANDKADMVLKEVTMKAQAAEKVKAEVQKVKDRAQAIVDSISKDKAIAEEKLEAAKPALEEAEAALQTIRPSDIATVRTLGRPPHLIMRIMDCVLLLFQRKVSAVKIDLEKSCTMPSWQESLKLMTAGNFLQNLQQFPKDTINEEVIEFLSPYFEMPDYNIETAKRVCGNVAGLCSWTKAMASFFSINKEVLPLKANLVVQENRHLLAMQDLQKAQAELDDKQAELDVVQAEYEQAMTEKQTLLEDAERCRHKMQTASTLISGLAGEKERWTEQSQEFAAQTKRLVGDVLLATAFLSYSGPFNQEFRDLLLNDWRKEMKARKIPFGKNLNLSEMLIDAPTISEWNLQGLPNDDLSIQNGIIVTKASRYPLLIDPQTQGKIWIKNKESRNELQITSLNHKYFRNHLEDSLSLGRPLLIEDVGEELDPALDNVLERNFIKTGSTFKVKVGDKEVDVLDGFRLYITTKLPNPAYTPEISARTSIIDFTVTMKGLEDQLLGRVILTEKQELEKERTHLMEDVTANKRRMKELEDNLLYRLTSTQGSLVEDESLIVVLSNTKRTAEEVTQKLEISAETEVQINSAREEYRPVATRGSILYFLITEMRLVNEMYQTSLRQFLGLFDLSLARSVKSPITSKRIANIIEHMTYEVYKYAARGLYEEHKFLFTLLLTLKIDIQRNRVKHEEFLTLIKGGASLDLKACPPKPSKWILDITWLNLVELSKLRQFSDVLDQISRNEKMWKIWFDKENPEEEPLPNAYDKSLDCFRRLLLIRSWCPDRTIAQARKYIVDSMGEKYAEGVILDLEKTWEESDPRTPLICLLSMGSDPTDSIIALGKRLKIETRYVSMGQGQEVHARKLLQQTMANGGWALLQNCHLGLDFMDELMDIIIETELVHDAFRLWMTTEAHKQFPITLLQMSIKFANDPPQGLRAGLKRTYSGVSQDLLDVSSGSQWKPMLYAVAFLHSTVQERRKFGALGWNIPYEFNQADFNATVQFIQNHLDDMDVKKGVSWTTIRYMIGEIQYGGRVTDDYDKRLLNTFAKVWFSENMFGPDFSFYQGYNIPKCSTVDNYLQYIQSLPAYDSPEVFGLHPNADITYQSKLAKDVLDTILGIQPKDTSGGGDETREAVVARLADDMLEKLPPDYVPFEVKERLQKMGPFQPMNIFLRQEIDRMQRVLSLVRSTLTELKLAIDGTIIMSENLRDALDCMFDARIPAWWKKASWISSTLGFWFTELIERNSQFTSWVFNGRPHCFWMTGFFNPQGFLTAMRQEITRANKGWALDNMVLCNEVTKWMKDDISAPPTEGVYVYGLYLEGAGWDKRNMKLIESKPKVLFELMPVIRIYAENNTLRDPRFYSCPIYKKPVRTDLNYIAAVDLRTAQTPEHWVLRGVALLCDVK

SEQ ID NO: 2992 - protein, 538 aa, Homo sapiens
MLQIGEDVDYLLIPREVRLAGGVWRVISKPATKEAEFRERLTQFLEEEGRTLEDVARIMEKSTPHPPQPPKKPKEPRVRRRVQQMVTPPPRLVVGTYDSSNASDSEFSDFETSRDKSRQGPRRGKKVRKMPVSYLGSKFLGSDLESEDDEELVEAFLRRQEKQPSAPPARRRVNLPVPMFEDNLGPQLSKADRWREYVSQVSWGKLKRRVKGWAPRAGPGVGEARLASTAVESAGVSSAPEGTSPGDRLGNAGDVCVPQASPRRWRPKINWASFRRRRKEQTAPTGQGADIEADQGGEAADSQREEAIADQREGAAGNQRAGAPADQGAEAADNQREEAADNQRAGAPAEEGAEAADNQREEAADNQRAEAPADQRSQGTDNHREEAADNQRAEAPADQGSEVTDNQREEAVHDQRERAPAVQGADNQRAQARAGQRAEAAHNQRAGAPGIQEAEVSAAQGTTGTAPGARARKQVKTVRFQTPGRFSWFCKRRRAFWHTPRLPTLPKRVPRAGEARNLRVLRAEARAEAEQGEQEDQL

SEQ ID NO: 2993 - protein, 315 aa, Homo sapiens
VVLGPRGAGLPGARARGLLCSARPGQLPLRTPQAVALSSKSGLSRGRKVMLSALGMLAAGGAGLAVALHSAVSASDLELHPPSYPWSHRGLLSSLDHTSIRRGFQVYKQVCASCHSMDFVAYRHLVGVCYTEDEAKELAAEVEVQDGPNEDGEMFMRPGKLFDYFPKPYPNSEAARAANNGALPPDLSYIVRARHGGEDYVFSLLTGYCEPPTGVSLREGLYFNPYFPGQAIAMAPPIYTDVLEFDDGTPATMSQIAKDVCTFLRWASEPEHDHRKRMGLKMLMMMALLVPLVYTIKRHKWSVLKSRKLAYRPPK

SEQ ID NO: 2994 - protein, 421 aa, Homo sapiens
MDQAKSAELEFVESGLGRCGLAFRPLATEPRGSSPVQLVSSTMSVRTLPLLFLNLGGEMLYILDQRLRAQNIRGDKARKVLNDIISTMFNRKFMEELFKPQELYSKKALRTVYERLAHASIMKLNQASMDKLYDLMTMAFKYQVLLCPRPKDVLLVTFNHLDTIKGFIRDSPTILQQVDETLRQLTEIYGGLSAGEFQLIRQTLLIFFQDLHIRVSMFLKDKVQNNNGRFVLPVSGPVPWGTEVPGLIRMFNNKGEEVKRIEFKHGGNYVPAPKEGSFELYGDRVLKLGTNMYSVNQPVETHVSGSSKNLASWTQESIAPNPLAKEELNFLARLMGGMEIKKPSGPEPGFRLNLFTTDEEEEQAALTRPEELSYEVINIQATQDQQRSEELARIMGEFEITEQPRLSTGKGDDLLAMMDEL

SEQ ID NO: 2995 - protein, 983 aa, Homo sapiens
KLLIQDLEDIEQRVPVMDAQYKIITKTAHLITKESPQEEGKEMFATMSKLKEQLTKVKECYSPLLYESQQLLIPLEELEKQMTSFYDSLGKINEIITVLEREAQSSALFKQKHQELLACQENCKKTLTLIEKGSQSVQKFVTLSNVLKHFDQTRLQRQIADIHVAFQSMVKKTGDWKKHVETNSRLMKKFEESRAELEKVLRIAQEGLEEKGDPEELLRRHTEFFSQLDQRVLNAFLKACDELTDILPEQEQQGLQEAVRKLHKQWKDLQGEAPYHLLHLKIDVEKNRFLASVEECRTELDRETKLMPQEGSEKIIKEHRVFFSDKGPHHLCEKRLQLIEELCVKLPVRDPVRDTPGTCHVTLKELRAAIDSTYRKLMEDPDKWKDYTSRFSEFSSWISTNETQLKGIKGEAIDTANHGEVKRAVEEIRNGVTKRGETLSWLKSRLKVLTEVSSENEAQKQGDELAKLSSSFKALVTLLSEVEKMLSNFGDCVQYKEIVKNSLEELISGSKEVQEQAEKILDTENLFEAQQLLLHHQQKTKRISAKKRDVQQQIAQAQQGEGGLPDRGHEELRKLESTLDGLERSRERQERRIQVTLRKWERFETNKETVVRYLFQTGSSHERFLSFSSLESLSSELEQTKEFSKRTESIAVQAENLVKEASEIPLGPQNKQLLQQQAKSIKEQVKKLEDTLEEDIKPMEMVKTKWDHFGSNFETLSVWITEKEKELNALETSSSAMDMQISQIKVTIQEIESKLSSIVGLEEEAQSFAQFVTTGESARIKAKLTQIRRYGEELREHAQCLEGTILGHLSQQQKFEENLRKIQQSVSEFEDKLAVPIKICSSATETYKVLQEHMDLCQALESLSSAITAFSASARKVVNRDSCVQEAAALQQQYEDILRRAKERQTALENLLAHWQRLEKELSSFLTWLERGEAKASSPEMDISADRVKVEGELQLIQASSRKCEEGKNKMLFVTVTLFKIIK

SEQ ID NO: 2996 - protein, 291 aa, Homo sapiens
AGLSAWTLQPQWIQVRNMATLKDITRRLKSIKNIQKITKSMKMVAAAKYARAERELKPARIYGLGSLALYEKADIKGPEDKKKHLLIGVSSDRGLCGAIHSSIAKQMKSEVATLTAAGKEVMLVGIGDKIRGILYRTHSDQFLVAFKEVGRKPPTFGDASVIALELLNSGYEFDEGSIIFNKFRSVISYKTEEKPIFSLNTVASADSMSIYDDIDADVLQNYQEYNLANIIYYSLKESTTSEQSARMTAMDNASKNASEMIDKLTLTFNRTRQAVITKELIEIISGAAALD

SEQ ID NO: 2997 - protein, 819 aa, Homo sapiens
MNLQPIFWIGLISSVCCVFAQTDENRCLKANAKSCGECIQAGPNCGWCTNSTFLQEGMPTSARCDDLEALKKKGCPPDDIENPRGSKDIKKNKNVTNRSKGTAEKLKPEDITQIQPQQLVLRLRSGEPQTFTLKFKRAEDYPIDLYYLMDLSYSMKDDLENVKSLGTDLMNEMRRITSDFRIGFGSFVEKTVMPYISTTPAKLRNPCTSEQNCTSPFSYKNVLSLTNKGEVFNELVGKQRISGNLDSPEGGFDAIMQVAVCGSLIGWRNVTRLLVFSTDAGFHFAGDGKLGGIVLPNDGQCHLENNMYTMSHYYDYPSIAHLVQKLSENNIQTIFAVTEEFQPVYKELKNLIPKSAVGTLSANSSNVIQLIIDAYNSLSSEVILENGKLSEGVTISYKSYCKNGVNGTGENGRKCSNISIGDEVQFEISITSNKCPKKDSDSFKIRPLGFTEEVEVILQYICECECQSEGIPESPKCHEGNGTFECGACRCNEGRVGRHCECSTDEVNSEDMDAYCRKENSSEICSNNGECVCGQCVCRKRDNTNEIYSGKFCECDNFNCDRSNGLICGGNGVCKCRVCECNPNYTGSACDCSLDTSTCEASNGQICNGRGICECGVCKCTDPKFQGQTCEMCQTCLGVCAEHKECVQCRAFNKGEKKDTCTQECSYFNITKVESRDKLPQPVQPDPVSHCKEKDVDDCWFYFTYSVNGNNEVMVHVVENPECPTGPDIIPIVAGVVAGIVLIGLALLLIWKLLMIIHDRREFAKFEKEKMNAKWDTPGVQWCDISSLQPLTSRFQQFSCLSLPSTWDYRVKILFIRVP

SEQ ID NO: 2998 - protein, 913 aa, Homo sapiens
MNEAMATDSPRRPSRCTGGVVVRPQAVTKQSYMESVVTFLQDVVPQAYSGTPLTEEKEKIVWVRFENADLNDTSRNLEFHEIHSTGSEPPLLIMIGYSDGMQVWSIPISGEAQELFSVRHGPIRAAKILPAPQFGAQKCDNFAEKRPLLGVCKSIGSSGTSPPYCCVDLYSLRTGEMVKSIQFKTPIYDLHCNKRILVVVLQEKIAAFDSCTFTKKFFVTSCYPCPGPNMNPIALGSRWLAYAENKLIRCHQSRGGACGDNIQSYTATVISAAKTLKSGLTMVGKVVTQLTGTLPSGVTEDDVAIHSNSRRSPLVPGIITVIDTETVGEGQVLVSEDSDSDGIVAHFPAHEKPVCCMAFNTSGMLLVTTDTLGHDFHVFQILTHPWSSSQCAVHHLYTLHRGETEAKVQDICFSHDCRWVVVSTLRGTSHVFPINPYGGQPCVRTHMSPRVVNRMSRFQKSAGLEEIEQELTSKQGGRCSPVPGLSSSPSGSPLHGKLNSQDSYNNFTNNNPGNPRLSPLPSLMVVMPLAQIKQPMTLGTITKRTGKVKPPPQISPSKSMGGEFCVAAIFGTSRSWFANNAGLKREKDQSKQVVVESLYIISCYGTLVEHMMEPRPLSTAPKISDDTPLEMMTSPRASWTLVRTPQWNELQPPFNANHPLLLAADAVQYYQFLLAGLVPPGSPGPITRHGSYDSLASDHSGQEDEEWLSQVEIVTHTGPHRRLWMGPQFQFKTIHPSGQTTVISSSSSVLQSHGPSDTPQPLLDFDTDDLDLNSLRIQPVRSDPVSMPGSSRPVSDRRGVSTVIDAASGTFDRSVTLLEVCGSWPEGFGLRHMSSMEHTEEGLRERLADAMAESPSRDVVGSGTELQREGSIETLSNSSGSTSGSIPRNFDGYRSPLPTNESQPLSLFPTGFP

SEQ ID NO: 2999 - protein, 726 aa, Homo sapiens
MEDRLHMDNGLVPQKIVSVHLQDSTLKEVKDQVSNKQAQILEPKPEPSLEIKPEQDGMEHVGRDDPKALGEEPKQRRGSASGSEPAGDSDRGGGPVEHYHLHLSSCHECLELENSTIESVKFASAENIPDLPYDYSSSLESVADETSPEREGRRVNLTGKAPNILLYVGSDSQEALGRFHEVRSVLADCVDIDSYILYHLLEDSALRDPWTDNCLLLVIATRESIPEDLYQKFMAYLSQGGKVLGLSSSFTFGGFQVTSKGALHKTVQNLVFSKADQSEVKLSVLSSGCRYQEGPVRLSPGRLQGHLENEDKDRMIVHVPFGTRGGEAVLCQVHLELPPSSNIVQTPEDFNLLKSSNFRRYEVLREILTTLGLSCDMKQVPALTPLYLLSAAEEIRDPLMQWLGKHVDSEGEIKSGQLSLRFVSSYVSEVEITPSCIPVVTNMEAFSSEHFNLEIYRQNLQTKQLGKVILFAEVTPTTMRLLDGLMFQTPQEMGLIVIAARQTEGKGRGGNVWLSPVGCALSTLLISIPLRSQLGQRIPFVQHLMSVAVVEAVRSIPKYQDINLRVKWPNDIYYSDLMKIGGVLVNSTLMGETFYILIGCGFNVTNSNPTICINDLITEYNKQHKAELKPLRADYLIARVVTVLEKLIKEFQDKGPNSVLPLYYRYWVHSGQQVHLGSAEGPKVSIVGLDDSGFLQVHQEGGEVVTVHPDGNSFDMLRNLILPKRR

SEQ ID NO: 3000 - protein, 547 aa, Homo sapiens
MSSSPWEPATLRRVFVVGVGMTKFVKPGAENSRDYPDLAEEAGKKALADAQIPYSAVDQACVGYVFGDSTCGQRAIYHSLGMTGIPIINVNNNCATGSTALFMARQLIQGGVAECVLALGFEKMSKGSLGIKFSDRTIPTDKHVDLLINKYGLSAHPVAPQMFGYAGKEHMEKYGTKIEHFAKIGWKNHKHSVNNPYSQFQDEYSLDEVMASKEVFDFLTILQCCPTSDGAAAAILASEAFVQKYGLQSKAVEILAQEMMTDLPSSFEEKSIIKMVGFDMSKEAARKCYEKSGLTPNDIDVIELHDCFSTNELLTYEALGLCPEGQGATLVDRGDNTYGGKWVINPSGGLISKGHPLGATGLAQCAELCWQLRGEAGKRQVPGAKVALQHNLGIGGAVVVTLYKMGFPEAASSFRTHQIEAVPTSSASDGFKANLVFKEIEKKLEEEGEQFVKKIGGIFAFKVKDGPGGKEATWVVDVKNGKGSVLPNSDKKADCTITMADSDFLALMTGKMNPQSAFFQGKLKITGNMGLAMKLQNLQLQPGNAKL

SEQ ID NO: 3001 - protein, 616 aa, Homo sapiens
MPFTLHLRSRLPSAIRSLILQKKPNIRNTSSMAGELRPASLVVLPRSLAPAFERFCQVNTGPLPLLGQSEPEKWMLPPQGAISETRMGHPQFWKYEFGACTGSLASLEQYSEQLKDMVAFFLGCSFSLEEALEKAGLPRRDPAGHSQTTVPCVTHAGFCCPLVVTMRPIPKDKLEGLVRACCSLGGEQGQPVHMGDPELLGIKELSKPAYGDAMVCPPGEVPVFWPSPLTSLGAVSSCETPLAFASIPGCTVMTDLKDAKAPPGCLTPERIPEVHHISQDPLHYSIASVSASQKIRELESMIGIDPGNRGIGHLLCKDELLKASLSLSHARSVLITTGFPTHFNHEPPEETDGPPGAVALVAFLQALEKEVAIIVDQRAWNLHQKIVEDAVEQGVLKTQIPILTYQGGSVEAAQAFLCKNGDPQTPRFDHLVAIERAGRAADGNYYNARKMNIKHLVDPIDDLFLAAKKIPGISSTGVGDGGNELGMGKVKEAVRRHIRHGDVIACDVEADFAVIAGVSNWGGYALACALYILYSCAVHSQYLRKAVGPSRAPGDQAWTQALPSVIKEEKMLGILVQHKVRSGVSGIVGMEVDGLPFHNTHAEMIQKLVDVTTAQV

SEQ ID NO: 3002 - protein, 740 aa, Homo sapiens
MASHLRPPSPLLVRVYKSGPRVRRKLESYFQSSKSSGGGECTVSTQEHEAPGTFRVEFSERAAKERVLKKGEHQILVDEKPVPIFLVPTENSIKKNTRPQISSLTQSQAETPSGDMHQHEGHIPNAVDSCLQKIFLTVTADLNCNLFSKEQRAYITTLCPSIRKMEGHDGIEKVCGDFQDIERIHQFLSEQFLESEQKQQFSPSMTERKPLSQQERDSCISPSEPETKAEQKSNYFEVPLPYFEYFKYICPDKINSIEKRFGVNIEIQESSPNMVCLDFTSSRSGDLEAARESFASEFQKNTEPLKQECVSLADSKQANKFKQELNHQFTKLLIKEKGGELTLLGTQDDISAAKQKISEAFVKIPVKLFAANYMMNVIEVDSAHYKLLETELLQEISEIEKRYDICSKVSEKGQKTCILFESKDRQVDLSVHAYASFIDAFQHASCQLMREVLLLKSLGKERKHLHQTKFADDFRKRHPNVHFVLNQESMTLTGLPNHLAKAKQYVLKGGGMSSLAGKKLKEGHETPMDIDSDDSKAASPPLKGSVSSEASELDKKEKGICVICMDTISNKKVLPKCKHEFCAPCINKAMSYKPICPTCQTSYGIQKGNQPEGSMVFTVSRDSLPGYESFGTIVITYSMKAGIQTEEHPNPGKRYPGIQRTAYLPDNKEGRKVLKLLYRAFDQKLIFTVGYSRVLGVSDVITWNDIHHKTSRFGGPEMYGYPDPSYLKRVKEELKAKGIE

SEQ ID NO: 3003 - protein, 281 aa, Homo sapiens
MAGTWLLLLLALGCPALPTGVGGTPFPSLAPPIMLLVDGKQQMVVVCLVLDVAPPGLDSPIWFSAGNGSALDAFTYGPSPATDGTWTNLAHLSLPSEELASWEPLVCHTGPGAEGHSRSTQPMHLSGEASTARTCPQEPLRGTPGGALWLGVLRLLLFKLLLFDLLLTCSCLCDPAGPLPSPATTTRLRALGSHRLHPATETGGREATSSPRPQPRDRRWGDTPPGRKPGSPVWGEGSYLSSYPTCPAQAWCSRSRLRAPSSSLGAFFRGDLPPPLQAGAA

SEQ ID NO: 3004 - protein, 990 aa, Homo sapiens
MSEETRQSKLAAAKKKLREYQQRNSPGVPTGAKKKKKIKNGSNPETTTSGGCHSPEDTPKDNAATLQPSDDTVLPGGVPSPGASLTSMAASQNHDADNVPNLMDETKTFSSTESLRQLSQQLNGLVCESATCVNGEGPASSANLKDLESRYQQLAVALDSSYVTNKQLNITIEKLKQQNQEITDQLEEEKKECHQKQGALREQLQVHIQTIGILVSEKAELQTALAHTQHAARQKEGESEDLASRLQYSRRRVGELERALSAVSTQQKKADRYNKELTKERDALRLELYKNTQSNEDLKQEKSELEEKLRVLVTEKAGMQLNLEELQKKLEMTELLLQQFSSRCEAPDANQQLQQAMEERAQLEAHLGQVMESVRQLQMERDKYAENLKGESAMWRQRMQQMSEQVHTLREEKECSMSRVQELETSLAELRNQMAEPPPPEPPAGPSEVEQQLQAEAEHLRKELEGLAGQLQAQVQDNEGLSRLNREQEERLLELERAAELWGEQAEARRQILETMQNDRTTISRALSQNRELKEQLAELQSGFVKLTNENMEITSALQSEQHVKRELGKKLGELQEKLSELKETVELKSQEAQSLQQQRDQYLGHLQQYVAAYQQLTSEKEVLHNQLLLQTQLVDQLQQQEAQGKAVAEMARQELQETQERLEAATQQNQQLRAQLSLMAHPGEGDGLDREEEEDEEEEEEEAVAVPQPMPSIPEDLESREAMVAFFNSAVASAEEEQARLRGQLKEQRVRCRRLAHLLASAQKEPEAAAPAPGTGGDSVCGETHRALQGAMEKLQSRFMELMQEKADLKERVEELEHRCIQLSGETDTIGEYIALYQSQRAVLKERHREKEEYISRLAQDKEEMKVKLLELQELVLRLVGDRNEWHGRFLAAAQNPADEPTSGAPAPQELGAANQQGDLCEVSLAGSVEPAQGEAREGSPRDNPTAQQIMQLLREMQNPRERPGLGSNPCIPFFYRADENDEVKITVI

SEQ ID NO: 3005 - protein, 284 aa, Homo sapiens; identical to SEQ ID NO: 1427

SEQ ID NO: 3006 - protein, 318 aa, Homo sapiens
MVELMFPLLLLLLPFLLYMAAPQIRKMLSSGVCTSTVQLPGKVVVVTGANTGIGKETAKELAQRGARVYLACRDVEKGELVAKEIQTTTGNQQVLVRKLDLSDTKSIRAFAKGFLAEEKHLHVLINNAGVMMCPYSKTADGFEMHIGVNHLGHFLLTHLLLEKLKESAPSRIVNVSSLAHHLGRIHFHNLQGEKFYNAGLAYCHSKLANILFTQELARRLKGSGVTTYSVHPGTVQSELVRHSSFMRWMWWLFSFFIKTPQQGAQTSLHCALTEGLEILSGNHFSDCHVAWVSAQARNETIARRLWDVSCDLLGLSID

SEQ ID NO: 3007 - protein, 763 aa, Homo sapiens; identical to SEQ ID NO: 1965

SEQ ID NO: 3008 - protein, 505 aa, Homo sapiens
MRLRRLALFPGVALLLAAGRLVAASDVLELTDDNFESRISDTGSAGLMLVEFFAPWCGHCKRLAPEYEAAATRLKGIVPLAKVDCTANTNTCNKYGVSGYPTLKIFRDGEEAGAYDGPRTADGIVSHLKKQAGPASVPLRTEEEFKKFISDKDASIVGFFDDSFSEAHSEFLKAASNLRDNYRFAHTNVESLVNEYDDNGEGIILFRPSHLTNKFEDKTVAYTEQKMTSGKIKKFIQENIFGICPHMTEDNKDLIQGKDLLIAYYDVDYEKNAKGSNYWRNRVMMVAKKFLDAGHKLNFAVASRKTFSHELSDFGLESTAGEIPVVAIRTAKGEKFVMQEEFSRDGKALERFLQDYFDGNLKRYLKSEPIPESNDGPVKVVVAENFDEIVNNENKDVLIEFYAPWCGHCKNLEPKYKELGEKLSKDPNIVIAKMDATANDVPSPYEVRGFPTIYFSPANKKLNPKKYEGGRELSDFISYLQREATNPPVIQEEKPKKKKKAQEDL

SEQ ID NO: 3009 - protein, 483 aa, Homo sapiens; identical to SEQ ID NO: 1602

SEQ ID NO: 3010 - protein, 396 aa, Homo sapiens
MAAPCVSYGGAVSYRLLLWGRGSLARKQGLWKTAAPELQTNVRSQILRLRHTAFVIPKKNVPTSKRETYTEDFIKKQIEEFNIGKRHLANMMGEDPETFTQEDIDRAIAYLFPSGLFEKRARPVMKHPEQIFPRQRAIQWGEDGRPFHYLFYTGKQSYYSLMHDVYGMLLTLEKHQSHWQAKSLLPEKTVTRDVIGSRWLIKEELEEMLVGKLSDLDYMQFIRLLEKLLTSQCGAAEEEFVQRFRRSVTLESKKQLIEPVQYDEQGMAFSKSEGKRKTAKAEAIVYKHGSGRIKVNGIDYQLYFPITQDREQLMFPFHFVDRLGKHDVTCTVSGGGRSAQAGAIRLAMAKALCSFVTEDEVEWMRQAGLLTTDPRVRERKKPGQEGARRKFTWKKR

SEQ ID NO: 3011 - protein, 322 aa, Homo sapiens
MSGELPPNINIKEPRWDQSTFIGRANHFFTVTDPRNILLTNEQLESARKIVHDYRQGIVPPGLTENELWRAKYIYDSAFHPDTGEKMILIGRMSAQVPMNMTITGCMMTFYRTTPAVLFWQWINQSFNAVVNYTNRSGDAPLTVNELGTAYVSATTGAVATALGLNALTKHVSPLIGRFVPFAAVAAANCINIPLMRQRELKVGIPVTDENGNRLGESANAAKQAITQVVVSRILMAAPGMAIPPFIMNTLEKKAFLKRFPWMSAPIQVGLVGFCLVFATPLCCALFPQKSSMSVTSLEAELQAKIQESHPELRRVYFNKGL

SEQ ID NO: 3012 - protein, 314 aa, Homo sapiens; identical to SEQ ID NO: 1679

SEQ ID NO: 3013 - protein, 282 aa, Homo sapiens
MGEHNLLNPGFVGPLVNIHTGDTFYFPNFRASGAQLPGLPSLSYPRRDNVCSLSWPSAEPCNGYPQPYLGSPVSLNPPFGRTCELARVEDGKGYYREPCAEGGGGGLKREERGRDPGAGPGAALLPLEPSGPPALGFKYDYAAGGGGGDGGGGAGPPHDPPSCQSLESDSSSSLLNEGNKGAGAGDPGSLVSPLNPGGGLSASGAPWYPINSRSRKKRKPYSKLQLAELEGEFLVNEFITRQRRRELSDRLNLSDQQVKIWFQNRRMKKKRLLLREQALSFF

SEQ ID NO: 3014 - protein, 452 aa, Homo sapiens; identical to SEQ ID NO: 2467

SEQ ID NO: 3015 - protein, 314 aa, Homo sapiens; identical to SEQ ID NO: 2204

SEQ ID NO: 3016 - protein, 333 aa, Homo sapiens [sequence omitted]

SEQ ID NO: 3017 - protein, 1626 aa, Homo sapiens
MAKSGGCGAGAGVGGGNGALTWVTLFDQNNAAKKEESETANKNDSSKKLSVERVYQKKTQLEHILLRPDTYIGSVEPLTQFMWVYDEDVGMNCREVTFVPGLYKIFDEILVNAADNKQRDKNMTCIKVSIDPESNIISIWNNGKGIPVVEHKVEKVYVPALIFGQLLTSSNYDDDEKKVTGGRNGYGAKLCNIFSTKFTVETACKEYKHSFKQTWMNNMMKTSEAKIKHFDGEDYTCITFQPDLSKFKMEKLDKDIVALMTRRAYDLAGSCRGVKVMFNGKKLPVNGFRSYVDLYVKDKLDETGVALKVIHELANERWDVCLTLSEKGFQQISFVNSIATTKGGRHVDYVVDQVVGKLIEVVKKKNKAGVSVKPFQVKNHIWVFINCLIENPTFDSQTKENMTLQPKSFGSKCQLSEKFFKAASNCGIVESILNWVKFKAQTQLNKKCSSVKYSKIKGIPKLDDANDAGGKHSLECTLILTEGDSAKSLAVSGLGVIGRDRYGVFPLRGKILNVREASHKQIMENAEINNIIKIVGLQYKKSYDDAESLKTLRYGKIMIMTDQDQDGSHIKGLLINFIHHNWPSLLKHGFLEEFITPIVKASKNKQELSFYSIPEFDEWKKHIENQKAWKIKYYKGLGTSTAKEAKEYFADMERHRILFRYAGPEDDAAITLAFSKKKIDDRKEWLTNFMEDRRQRRLHGLPEQFLYGTATKHLTYNDFINKELILFSNSDNERSIPSLVDGFKPGQRKVLFTCFKRNDKREVKVAQLAGSVAEMSAYHHGEQALMMTIVNLAQNFVGSNNINLLQPIGQFGTRLHGGKDAASPRYIFTMLSTLARLLFPAVDDNLLKFLYDDNQRVEPEWYIPIIPMVLINGAEGIGTGWACKLPNYDAREIVNNVRRMLDGLDPHPMLPNYKNFKGTIQELGQNQYAVSGEIFVVDRNTVEITELPVRTWTQVYKEQVLEPMLNGTDKTPALISDYKEYHTDTTVKFVVKMTEEKLAQAEAAGLHKVFKLQTTLTCNSMVLFDHMGCLKKYETVQDILKEFFDLRLSYYGLRKEWLVGMLGAESTKLNNQARFILEKIQGKITIENRSKKDLIQMLVQRGYESDPVKAWKEAQEKAAEEDETQNQHDDSSSDSGTPSGPDFNYILNMSLWSLTKEKVEELIKQRDAKGREVNDLKRKSPSDLWKEDLAAFVEELDKVESQEREDVLAGMSGKAIKGKVGKPKVKKLQLEETMPSPYGRRIIPEITAMKADASKKLLKKKKGDLDTAAVKVEFDEEFSGAPVEGAGEEALTPSVPINKGPKPKREKKEPGTRVRKTPTSSGKPSAKKVKKRNPWSDDESKSESDLEETEPVVIPRDSLLRRAAAERPKYTFDFSEEEDDDADDDDDDNNDLEELKVKASPITNDGEDEFVPSDGLDKDEYTFSPGKSKATPEKSLHDKKSQDFGNLFSFPSYSQKSEDDSAKFDSNEEDSASVFSPSFGLKQTDKVPSKTVAAKKGKPSSDTVPKPKRAPKQKKVVEAVNSDSDSEFGIPKKTTTPKGKGRGAKKRKASGSENEGDYNPGRKTSKTTSKKPKKTSFDQDSDVDIFPSDFPTEPPSLPRTGRARKEVKYFAESDEEEDDVDFAMFN

SEQ ID NO: 3018 - protein, 1104 aa, Homo sapiens
MSFRAARLSMRNRRNDTLDSTRTLYSSASRSTDLSYSESDLVNFIQANFKKRECVFFIKDSKATENVCKCGYAQSQHMEGTQINQSEKWNYKKHTKEFPTDAFGDIQFETLGKKGKYIRLSCDTDAEILYELLTQHWHLKTPNLVISVTGGAKNFALKPRMRKIFSRLIYIAQSKGAWILTGGTHYGLMKYIGEVVRDNTISRSSEENIVAIGIAAWGMVSNRDTLIRNCDAEGYFLAQYLMDDFTRDPLYILDNNHTHLLLVDNGCHGHPTVEAKLRNQLEKYISERTIQDSNYGGKIPIVCFAQGGGKETLKAINTSIKNKIPCVVVEGSGQIADVIASLVEVEDALTSSAVKEKLVRFLPRTVSRLPEEETESWIKWLKEILECSHLLTVIKMEEAGDEIVSNAISYALYKAFSTSEQDKDNWNGQLKLLLEWNQLDLANDEIFTNDRRWESADLQEVMFTALIKDRPKFVRLFLENGLNLRKFLTHDVLTELFSNHFSTLVYRNLQIAKNSYNDALLTFVWKLVANFRRGFRKEDRNGRDEMDIELHDVSPITRHPLQALFIWAILQNKKELSKVIWEQTRGCTLAALGASKLLKTLAKVKNDINAAGESEELANEYETRAVELFTECYSSDEDLAEQLLVYSCEAWGGSNCLELAVEATDQHFIAQPGVQNFLSKQWYGEISRDTKNWKIILCLFIIPLVGCGFVSFRKKPVDKHKKLLWYYVAFFTSPFVVFSWNVVFYIAFLLLFAYVLLMDFHSVPHPPELVLYSLVFVLFCDEVRQWYVNGVNYFTDLWNVMDTLGLFYFIAGIVFRLHSSNKSSLYSGRVIFCLDYIIFTLRLIHIFTVSRNLGPKIIMLQRMLIDVFFFLFLFAVWMVAFGVARQGILRQNEQRWRWIFRSVIYEPYLAMFGQVPSDVDGTTYDFAHCTFTGNESKPLCVELDEHNLPRFPEWITIPLVCIYMLSTNILLVNLLVAMFGYTVGTVQENNDQVWKFQRYFLVQEYCSRLNIPFPFIVFAYFYMVVKKCFKCCCKEKNMESSVCCFKNEDNETLAWEGVMKENYLVKINTKANDTSEEMRHRFRQLDTKLNDLKGLLKEIANKIK

SEQ ID NO: 3019 - protein, 146 aa, Homo sapiens
MHLTPEEKSAVTALWGKVNVDEVGGEALGRLLVVYPWTQRFFESFGDLSTPDAVMGNPKVKAHGKKVLGAFSDGLAHLDNLKGTFATLSELHCDKLHVDPENFRLLGNVLVCVLAHHFGKEFTPPVQAAYQKVVAGVANALAHKYH

SEQ ID NO: 3020 - protein, 505 aa, Homo sapiens
SEAVADREDDPNFFKMVEGFFDRGASIVEDKLVEDLRTRESEEQKRNRVRGILRIIKPCNHVLSLSFPIRRDDGSWEVIEGYRAQHSQHRTPCKGGIRYSTDVSVDEVKALASLMTYKCAVVDVPFGGAKAGVKINPKNYTDNELEKITRRFTMELAKKGFIGPGIDVPAPDMSTGEREMSWIADTYASTIGHYDINAHACVTGKPISQGGIHGRISATGRGVFHGIENFINEASYMSILGMTPGFGDKTFVVQGFGNVGLHSMRYLHRFGAKCIAVGESDGSIWNPDGIDPKELEDFKLQHGSILGFPKAKPYEGSILEADCDILIPAASEKQLTKSNAPRVKAKIIAEGANGPTTPEADKIFLERNIMVIPDLYLNAGGVTVSYFEWLKNLNHVSYGRLTFKYERDSNYHLLMSVQESLERKFGKHGGTIPIVPTAEFQDRISGASEKDIVHSGLAYTMERSARQIMRTAMKYNLGLDLRTAAYVNAIEKVFKVYNEAGVTFT

SEQ ID NO: 3021 - protein, 485 aa, Homo sapiens
ERGLETNSCSEEELSSPGRGGGGGGRLLLQPPGPELPPVPFPLQDLVPLGRLSRGEQQQQQQQQPPPPPPPPGPLRPLAGPSRKGSFKIRLSRLFRTKSCNGGSGGGDGTGKRPSGELAASAASLTDMGGSAGRELDAGRKPKLTRTQSAFSPVSFSPLFTGETVSLVDVDISQRGLTSPHPPTPPPPPRRSLSLLDDISGTLPTSVLVAPMGSSLQSFPLPPPPPPHAPDAFPRIAPIRAAESLHSQPPQHLQCPLYRPDSSSFAASLRELEKCGWYWGPMNWEDAEMKLKGKPDGSFLVRDSSDPRYILSLSFRSQGITHHTRMEHYRGTFSLWCHPKFEDRCQSVVEFIKRAIMHSKNGKFLYFLRSRVPGLPPTPVQLLYPVSRFSNVKSLQHLCRFRIRQLVRIDHIPDLPLPKPLISYIRKFYYYDPQEEVYLSLKEAQLISKQKQEVEPSTWRGAPRWSPPRAFGCQAPALKNQIKLP

SEQ ID NO: 3022 - protein, 471 aa, Homo sapiens
MGCDRNCGLIAGAVIGAVLAVFGGILMPVGDLLIQKTIKKQVVLEEGTIAFKNWVKTGTEVYRQFWIFDVQNPQEVMMNSSNIQVKQRGPYTYRVRFLAKENVTQDAEDNTVSFLQPNGAIFEPSLSVGTEADNFTVLNLAVAAASHIYQNQFVQMILNSLINKSKSSMFQVRTLRELLWGYRDPFLSLVPYPVTTTVGLFYPYNNTADGVYKVFNGKDNISKVAIIDTYKGKRNLSYWESHCDMINGTDAASFPPFVEKSQVLHSFFSVFRSIYAVFESDVNLKGIPVYRFVLPSKAFASPVENPDNYCFCTEKIISKNCTSYGVLDISKCKEGRPVYISLPHFLYASPDVSEPIDGLNPNEEEHRTYLDIEPITGFTLQFAKRLQVNLLVKPSEKIQVLKNLKRNYIVPILWLNETGTIGDEKANMFRSQVTGKINLLGLIEMILLSVGVVMFVAFMISYCACRSKTIK

SEQ ID NO: 3023 - protein, 730 aa, Homo sapiens
MSKNSEFINLSFLLDHEKEMILGVLKRDEYLKKVEDKRIRKLKNELLEAKRRSGKTQQEASRVCVHCHRNLGLIFDRGDPCQACSLRVCRECRVAGPNGSWKCTVCDKIAQLRIITGEWFFEEKAKRFKQVNVLGTDVVRQSILRRSPGAEEVQSQEQTRQDAEKSDTSPVAGKKASHDGPKRKGFLLSKFRSATRGEIITPKTDTGRSYSLDLDGQHFRSLKSPPGSDRGSTGSSDLNDQEPGPRTPKSSRSNGVTPGTQSSPAPSTRTVTSVISREYGFENSMDLAAIEGTSQELTKSHRRNTSGTPSIAVSGTSLSSDQSRSELDLSESFTEDSEDTVSIRSKSVPGALDKDSLEETEESIDALVSSQLSTNTHRLASGLSTTSLNSMMSVYSETGDYGNVKVSGEILLHISYCYKTGGLYIFVKNCRNLAIGDEKKQRTDAYVKSYLLPDKSRNNKRKTKIRTGTNPEFNETLKYTISHTQLETRTLQLSVWHYDRFGRNSFLGEVEIPFDSWNFENPTDEWFVLQPKVEFAPDIGLQYKGELTVVLRYIPPEENLMLPPEQLQGNKTFKKGKKKESPVISGGILEVFIKEAKNLTAVKSGGTSDSFVKGYLLPDDSKATKHKTLVIKKSVNPQWNHTFMFSGIHPQDIKNVCLELTIWDKEAFSSNIFLGGVRLNSGSGVSHGKNVDWMDSQGEEQRLWQKMANNPGTPFEGVLMLRSSMGKCRL

SEQ ID NO: 3024 - protein, 4074 aa, Homo sapiens
MTAWLISLMSIEVLLLAVRHLSLHIEPEEGSLAGGTWITVIFDGLELGVLYPNNGSQLEIHLVNVNMVVPALRSVPCDVFPVFLDLPVVTCRTRSVLSEAHEGLYFLEAYFGGQLVSSPNPGPRDSCTFKFSKAQTPIVHQVYPPSGVPGKLIHVYGWIITGRLETFDFDAEYIDSPVILEAQGDKWVTPCSLINRQMGSCYPIQEDHGLGTLQCHVEGDYIGSQNVSFSVFNKGKSMVHKKAWLISAKQDLFLYQTHSEILSVFPETGSLGGRTNITITGDFFDNSAQVTIAGIPCDIRHVSPRKIECTTRAPGKDVRLTTPQPGNRGLLFEVGDAVEGLELTEATPGYRWQIVPNASSPFGFWSQEGQPFRARLSGFFVAPETNNYTFWIQADSQASLHFSWSEEPRTKVKVASISVGTADWFDSWEQNRDEGTWQQKTPKLELLGGAMYYLEAEHHGIAPSRGMRIGVQIHNTWLNPDVVTTYLREKHQIRVRAQRLPEVQVLNVSGRGNFFLTWDNVSSQPIPANATAHLIQTTIEELLAVKCKLEPLWSNILLRLGFERGPEVSNSDGDLTSGTEPFCGRFSLRQPRHLVLTPPAAQKGYRLDQYTHLCLAYKGHMNKILKMIVSFTIGFQNMVKNTTCDWSLTRTSPESWQFDCTDLWETCVRCFGDLQPPPANSPVLVHQINLLPLAQETGLFYVDEIIIADTNVTVSQADSGTARPGGNLVESVSVVGSPPVYSVTSWLAGCGTELPLITARSVPTEGTEEGSGLVLVTTQRRQRTSPPLGGHFRIQLPNTVISDVPVQISAHHLHQLLQNNADDFTSRYLNASDFTVKEDLYTCYEHVWTLSWSTQIGDLPNFIRVSDENLTGVNPAAATRVVYDGGVFLGPIFGDMLATANQHTQVVVRVNDVPAHCPGSCSFQYLQGSTPCVHSVWYSIDGDINLMIYITGTGFSGDSQFLQVTVNKTSCKVIFSNQTNVVCQTDLLPVGMHRILMLVRPSGLAISATGEDLFLNVKPRLDMVEPSRAADIGGLWATIRGSSLEGVSLILFGSYSCAINVATSNSSRIQCKVPPRGKDGRIVNVTVIRGDYSAVLPRAFTYVSSLNPVIVTLSRNISNIAGGETLVIGVARLMNYTDLDVEVHVQDALAPVHTQSAWGLEVALPPLPAGLHRISVSINGVSIHSQGVDLHIQYLTEVFSIEPCCGSLLGGTILSISGIGFSRDPALVWVLVGNRSCDIVNLTEASIWCETLPAPQIPDAGAPTVPAAVEVWAGNRFFARGPSPSLVGKGFTFMYEAAATPVVTAMQGEITNSSLSLHVGGSNLSNSVILLGNLNCDVETQSFQGNVSLSGCSIPLHSLEAGIYPLQVRQKQMGFANMSVVLQQFAVMPRIMAIFPSQGSACGGTILTVRGLLLNSRRRSVRVDLSGPFTCVILSLGDHTILCQVSLEGDPLPGASFSLNVTVLVNGLTSECQGNCTLFIREEASPVMDALSTNTSGSLTTVLIRGQRLATTADEPMVFVDDQLPCNVTFFNASHVVCQTRDLAPGPHYLSVFYTRNGYACSGNVSRHFYIMPQVFHYFPKNFSLHGGSLLTIEGTGLRGQNTTSVYIDQQTCLTVNIGAELIRCIVPTGNGSVALEIEVDGLWYHIGVIGYNKAFTPELISISQSDDILTFAVAQISGAANIDIFIGMSPCVGVSGNHTVLQCVVPSLPAGEYHVRGYDCIRGWASSALVFTSRVIITAVTENFGCLGGRLVHVFGAGFSPGNVSAAVCGAPCRVLANATVSAFSCLVLPLDVSLAFLCGLKREEDSCEAARHTYVQCDLTVAMATEQLLESWPYLYICEESSQCLFVPDHWAESMFPSFSGLFISPKLERDEVLIYNSSCNITMETEAEMECETPNQPITVKITEIRKRWGQNTQGNFSLQFCRRWSRTHSWFPERLPQDGDNVTVENGQLLLLDTNTSILNLLHIKGGKLIFMAPGPIELRAHAILVSDGGELRIGSEDKPFQGRAQITLYGSSYSTPFFPYGVKFLAVRNGTLSLHGSLPEVIVTCLRATAHALDTVLALEDAVDWNPGDEVVIISGTGVKGAKPMEEIVTVETVQDTDLYLKSPLRYSHNFTENWVAGEHHILKATVALLSRSITIQGNLTNEREKLLVSCQEANAPEGNLQHCLYSMSEKMLGSRDMGARVIVQSFPEEPSQVQLKGVQFQVLGQAFHKHLSSLTLVGAMRESFIQGCTVRNSFSRGLSMCGTLGLKVDSNVFYNILGHALLVGTCTEMRYISWEAIHGRKDDWSGHGNIIRNNVIIQVSGAEGLSNPEMLTPSGIYICSPTNVIEGNRVCGAGYGYFFHLMTNQTSQAPLLSFTQNIAHSCTRYGLFVYPKFQPPWDNVTGTTLFQSFTVWESAGGAQIFRSSNLRLKNFKVYSCRDFGIDVLESDANTSVTDSLLLGHFAHKGSLCMSSGIKTPKRWELMVSNTTFVNFDLINCVAIRTCSDCSQGQGGFTVKTSQLKFTNSSNLVAFPFPHAAILEDLDGSLSGKNRSHILASMETLSASCLVNSSFGRVVHGSACGGGVLFHRMSIGLANTPEVSYDLTMTDSRNKTTTVNYVRDTLSNPRGWMALLLDQETYSLQSENLWINRSLQYSATFDNFAPGNYLLLVHTDLPPYPDILLRCGSRVGLSFPFLPSPGQNQGCDWFFNSQLRQLTYLVSGEGQVQVILRVKEGMPPTISASTSAPESALKWSLPETWQGVEEGWGGYNNTIPGPGDDVLILPNRTVLVDTDLPFFKGLYVMGTLDFPVDRSNVLSVACMVIAGGELKVGTLENPLEKEQKLLILLRASEGVFCDRMNGIHIDPGTIGVYGKVHLYSAYPKNSWTHLGADIASGNERIIVEDAVDWRPHDKIVLSSSSYEPHEAEVLTVKEVKGHHVRIYERLKHRHIGSVHVTEDGRHIRLAAEVGLLTRNIQIQPDVSCRGRLFVGSFRKSSREEFSGVLQLLNVEIQNFGSPLYSSVEFSNVSAGSWIISSTLHQSCGGGIHAAASHGVLLNDNIVFGTAGHGIDLEGQAYTVTNNLVVLMTQPAWSTIWVAGIKVNQVKDINLHGNVVAGSERLGFHIRGHKCSSCELLWSDNVAHSSLHGLHLYKESGLDNCTRISGFLAFKNFDYGAMLHVENSVEIENITLVDNTIGLLAVVYVFSAPQNSVKKVQIVLRNSVIVATSSSFDCIQDKVKPHSANLTSTDRAPSNPRGGRIGILWPVFTSEPNQWPQEPWHKVRNDHSISGIMKLQDVTFSSFVKSCYSDDLDVCILPNAENSGIMHPITAERTRMLKIKDKNKFYFPSLQPRKDLGKVVCPELDCASPRKYLFKDLDGRALGLPPPVSVFPKTEAEWTASFFNAGTFREEQKCTYQFLMQGFICKQTDQVVLILDSADAIWAIQKLYPVVSVTSGFVDVFSSVNANIPCSTSGSVSTFYSILPIRQITKVCFMDQTPQVLRFFLLGNKSTSKLLLAVFYHELQSPHVFLGESFIPPTLVQSASLLLNESIGANYFNIMDNLLYVVLQGEEPIEIRSGVSIHLALTVMVSVLEKGWEIVILERLTNFLQIGQNQIRFIHEMPGHEETLKAIADSRAKRKRNCPTVTCTSHYRRVGQRRPLMMEMNSHRASPPMTVETISKVIVIEIGDSPTVRSTGMISSLSSNKLQNLAHRVITAQQTGVLENVLNMTIGALLVTQSKGVIGYGNTSSFKTGNLIYIRPYALSILVQPSDGEVGNELPVQPQLVFLDEQNRRVESLGPPSEPWTISASLEGASDSVLKGCTQAETQDGYVSFYNLAVLISGSNWHFIFTVTSPPGVNFTARSKPFAVLPVTRKEKSTIILAASLSSVASWLALSCLVCCWLKRSKSRKTKPEEIPESQTNNQNIHIHISSKRRESQGPKKEDTVVGEDMRMKVMLGKVNQCPHQLMNGVSRRKVSRHIVREEEAAVPAPGTTGITSHGHICAPGAPAQQVYLQETGNWKEGQEQLLRYQLAGQNQLLLLCPDFRQERQQLPGQSRLSKQSGSLGLSQEKKASCGATEAFCLHSVHPETIQEQL

SEQ ID NO: 3025 - protein, 615 aa, Homo sapiens [sequence omitted]

SEQ ID NO: 3026 - protein, 4 aa, Artificial Sequence
  Synthetic peptide substrate used to determine caspase activity.
YVAD

SEQ ID NO: 3027 - protein, 18 aa, Artificial Sequence
  Peptide containing doubly oxidized tryptophan (N-formylkynurenine) from the human cardiac proteome.
  MOD_RES 10: Xaa = N-formylkynurenine
KLETAVNLAXTAGNSNTR

SEQ ID NO: 3028 - protein, 13 aa, Artificial Sequence
  Peptide containing doubly oxidized tryptophan (N-formylkynurenine) from the human cardiac proteome.
  MOD_RES 10: Xaa = N-formylkynurenine
VFEISPFEPXITR

SEQ ID NO: 3029 - protein, 12 aa, Artificial Sequence
  Peptide containing doubly oxidized tryptophan (N-formylkynurenine) from the human cardiac proteome.
  MOD_RES 11: Xaa = N-formylkynurenine
FGPIPLGSLGXK

SEQ ID NO: 3030 - protein, 13 aa, Artificial Sequence
  Peptide containing doubly oxidized tryptophan (N-formylkynurenine) from the human cardiac proteome.
  MOD_RES 1: Xaa = N-formylkynurenine
XLSAEIEDVKPAK

SEQ ID NO: 3031 - protein, 27 aa, Artificial Sequence
  Peptide containing doubly oxidized tryptophan (N-formylkynurenine) from the human cardiac proteome.
  MOD_RES 9: Xaa = N-formylkynurenine
HAGGVTGGXDNLLAVIPGGSSTPLIPK

SEQ ID NO: 3032 - protein, 16 aa, Artificial Sequence
  Peptide containing doubly oxidized tryptophan (N-formylkynurenine) from the human cardiac proteome.
  MOD_RES 12: Xaa = N-formylkynurenine
GDARPAEIDSLXEISK

SEQ ID NO: 3033 - protein, 10 aa, Artificial Sequence
  Peptide containing doubly oxidized tryptophan (N-formylkynurenine) from the human cardiac proteome.
  MOD_RES 4: Xaa = N-formylkynurenine
GPDXILGEIK

SEQ ID NO: 3034 - protein, 17 aa, Artificial Sequence
  Peptide containing doubly oxidized tryptophan (N-formylkynurenine) from the human cardiac proteome.
  MOD_RES 13: Xaa = N-formylkynurenine
LAALPENPPAIDXAYYK

SEQ ID NO: 3035 - protein, 16 aa, Artificial Sequence
  Peptide containing doubly oxidized tryptophan (N-formylkynurenine) from the human cardiac proteome.
  MOD_RES 4: Xaa = N-formylkynurenine
TIDXVAFAEIIPQNQK

SEQ ID NO: 3036 - protein, 12 aa, Artificial Sequence
  Peptide containing doubly oxidized tryptophan (N-formylkynurenine) from the human cardiac proteome.
  MOD_RES 4: Xaa = N-formylkynurenine
YPYXPHQPIENL

SEQ ID NO: 3037 - protein, 15 aa, Artificial Sequence
  Peptide containing doubly oxidized tryptophan (N-formylkynurenine) from the human cardiac proteome.
  MOD_RES 1: Xaa = N-formylkynurenine
XVVIGDENYGEGSSR

SEQ ID NO: 3038 - protein, 12 aa, Artificial Sequence
  Peptide containing doubly oxidized tryptophan (N-formylkynurenine) from the human cardiac proteome.
  MOD_RES 7: Xaa = N-formylkynurenine
VAEKEGXPLDIR

SEQ ID NO: 3039 - protein, 17 aa, Artificial Sequence
  Peptide containing doubly oxidized tryptophan (N-formylkynurenine) from the human cardiac proteome.
  MOD_RES 2: Xaa = N-formylkynurenine
LXISNGGLADIFTVFAK

SEQ ID NO: 3040 - protein, 9 aa, Artificial Sequence
  Peptide containing doubly oxidized tryptophan (N-formylkynurenine) from the human cardiac proteome.
  MOD_RES 8: Xaa = N-formylkynurenine
IFGSEAAXK

SEQ ID NO: 3041 - protein, 12 aa, Artificial Sequence
  Peptide containing doubly oxidized tryptophan (N-formylkynurenine) from the human cardiac proteome.
  MOD_RES 10: Xaa = N-formylkynurenine
ALGVLAQLIXSR

SEQ ID NO: 3042 - protein, 11 aa, Artificial Sequence
  Peptide containing doubly oxidized tryptophan (N-formylkynurenine) from the human cardiac proteome.
  MOD_RES 4: Xaa = N-formylkynurenine
DYIXNTLNSGR

SEQ ID NO: 3043 - protein, 19 aa, Artificial Sequence
  Peptide containing doubly oxidized tryptophan (N-formylkynurenine) from the human cardiac proteome.
  MOD_RES 1: Xaa = N-formylkynurenine
XNTDNTLGTEITVEDQLAR

SEQ ID NO: 3044 - protein, 15 aa, Artificial Sequence
  Peptide containing doubly oxidized tryptophan (N-formylkynurenine) from the human cardiac proteome.
  MOD_RES 10: Xaa = N-formylkynurenine
VVDGAVGAQXLAEFR

SEQ ID NO: 3045 - protein, 14 aa, Artificial Sequence
  Peptide containing doubly oxidized tryptophan (N-formylkynurenine) from the human cardiac proteome.
  MOD_RES 8: Xaa = N-formylkynurenine
VPEANSSXMDTVIR

SEQ ID NO: 3046 - protein, 9 aa, Artificial Sequence
  Peptide containing doubly oxidized tryptophan (N-formylkynurenine) from the human cardiac proteome.
  MOD_RES 7: Xaa = N-formylkynurenine
SAVTALXGK

SEQ ID NO: 3047 - protein, 10 aa, Artificial Sequence
  Peptide containing doubly oxidized tryptophan (N-formylkynurenine) from the human cardiac proteome.
  MOD_RES 7: Xaa = N-formylkynurenine
LLVVYPXTQR

SEQ ID NO: 3048 - protein, 23 aa, Artificial Sequence
  Peptide containing doubly oxidized tryptophan (N-formylkynurenine) from the human cardiac proteome.
  MOD_RES 9: Xaa = N-formylkynurenine
RPPEPTTPXQEDPEPEDENLYEK

SEQ ID NO: 3049 - protein, 14 aa, Artificial Sequence
  Peptide containing doubly oxidized tryptophan (N-formylkynurenine) from the human cardiac proteome.
  MOD_RES 7: Xaa = N-formylkynurenine
NLTQYSXLLDGFPR

SEQ ID NO: 3050 - protein, 14 aa, Artificial Sequence
  Peptide containing doubly oxidized tryptophan (N-formylkynurenine) from the human cardiac proteome.
  MOD_RES 7: Xaa = N-formylkynurenine
FDLNSPXEAFPVYR

SEQ ID NO: 3051 - protein, 13 aa, Artificial Sequence
  Peptide containing doubly oxidized tryptophan (N-formylkynurenine) from the human cardiac proteome.
  MOD_RES 9: Xaa = N-formylkynurenine
IASGLGLAXIVGR

SEQ ID NO: 3052 - protein, 10 aa, Artificial Sequence
  Peptide containing doubly oxidized tryptophan (N-formylkynurenine) from the human cardiac proteome.
  MOD_RES 9: Xaa = N-formylkynurenine
GYIVIEDLXK

SEQ ID NO: 3053 - protein, 16 aa, Artificial Sequence
  Peptide containing doubly oxidized tryptophan (N-formylkynurenine) from the human cardiac proteome.
  MOD_RES 12: Xaa = N-formylkynurenine
ASSTSPVEISEXLDQK

SEQ ID NO: 3054 - protein, 17 aa, Artificial Sequence
  Peptide containing doubly oxidized tryptophan (N-formylkynurenine) from the human cardiac proteome.
  MOD_RES 15: Xaa = N-formylkynurenine
GRPTSTNPIASIFAXTR

SEQ ID NO: 3055 - protein, 14 aa, Artificial Sequence
  Peptide containing doubly oxidized tryptophan (N-formylkynurenine) from the human cardiac proteome.
  MOD_RES 8: Xaa = N-formylkynurenine
GLLTYTSXEDALSR

SEQ ID NO: 3056 - protein, 13 aa, Artificial Sequence
  Peptide containing doubly oxidized tryptophan (N-formylkynurenine) from the human cardiac proteome.
  MOD_RES 3: Xaa = N-formylkynurenine
IPXFQYPIIYDIR

SEQ ID NO: 3057 - protein, 16 aa, Artificial Sequence
  Peptide containing doubly oxidized tryptophan (N-formylkynurenine) from the human cardiac proteome.
  MOD_RES 7,14: Xaa = N-formylkynurenine
GLSDGEXQLVLNVXGK

SEQ ID NO: 3058 - protein, 11 aa, Artificial Sequence
  Peptide containing doubly oxidized tryptophan (N-formylkynurenine) from the human cardiac proteome.
  MOD_RES 3: Xaa = N-formylkynurenine
ASXSSLSMDEK

SEQ ID NO: 3059 - protein, 9 aa, Artificial Sequence
  Peptide containing doubly oxidized tryptophan (N-formylkynurenine) from the human cardiac proteome.
  MOD_RES 7: Xaa = N-formylkynurenine
LDDLVNXAR

SEQ ID NO: 3060 - protein, 9 aa, Artificial Sequence
  Peptide containing doubly oxidized tryptophan (N-formylkynurenine) from the human cardiac proteome.
  MOD_RES 4: Xaa = N-formylkynurenine
TLLXTELFR

SEQ ID NO: 3061 - protein, 10 aa, Artificial Sequence
  Peptide containing doubly oxidized tryptophan (N-formylkynurenine) from the human cardiac proteome.
  MOD_RES 8: Xaa = N-formylkynurenine
SYGANFSXNK

SEQ ID NO: 3062 - protein, 18 aa, Artificial Sequence
  Peptide containing doubly oxidized tryptophan (N-formylkynurenine) from the human cardiac proteome.
  MOD_RES 13: Xaa = N-formylkynurenine
ASLHALVGSPIIXGGEPR

SEQ ID NO: 3063 - protein, 11 aa, Artificial Sequence
  Peptide containing doubly oxidized tryptophan (N-formylkynurenine) from the human cardiac proteome.
  MOD_RES 1: Xaa = N-formylkynurenine
XEVADLQPQLK

SEQ ID NO: 3064 - protein, 9 aa, Artificial Sequence
  Peptide containing doubly oxidized tryptophan (N-formylkynurenine) from the human cardiac proteome.
  MOD_RES 8: Xaa = N-formylkynurenine
YEGFFSLXK

SEQ ID NO: 3065 - protein, 10 aa, Artificial Sequence
  Peptide containing doubly oxidized tryptophan (N-formylkynurenine) from the human cardiac proteome.
  MOD_RES 7: Xaa = N-formylkynurenine
LITTQQXLIK

SEQ ID NO: 3066 - protein, 15 aa, Artificial Sequence
  Peptide containing doubly oxidized tryptophan (N-formylkynurenine) from the human cardiac proteome.
  MOD_RES 14: Xaa = N-formylkynurenine
LWEPLVEEPPADQXK

SEQ ID NO: 3067 - protein, 11 aa, Artificial Sequence
  Peptide containing doubly oxidized tryptophan (N-formylkynurenine) from the human cardiac proteome.
  MOD_RES 9: Xaa = N-formylkynurenine
IDEAILITXTK

SEQ ID NO: 3068 - protein, 10 aa, Artificial Sequence
  Peptide containing doubly oxidized tryptophan (N-formylkynurenine) from the human cardiac proteome.
  MOD_RES 1: Xaa = N-formylkynurenine
XDGQETTLVR

SEQ ID NO: 3069 - protein, 18 aa, Artificial Sequence
  Peptide containing doubly oxidized tryptophan (N-formylkynurenine) from the human cardiac proteome.
  MOD_RES 2,7: Xaa = N-formylkynurenine
HXLDSPXPGFFTLDGQPR

SEQ ID NO: 3070 - protein, 14 aa, Artificial Sequence
  Peptide containing doubly oxidized tryptophan (N-formylkynurenine) from the human cardiac proteome.
  MOD_RES 2: Xaa = N-formylkynurenine
AXNGSAEGPGKVER

SEQ ID NO: 3071 - protein, 12 aa, Artificial Sequence
  Peptide containing doubly oxidized tryptophan (N-formylkynurenine) from the human cardiac proteome.
  MOD_RES 3: Xaa = N-formylkynurenine
ELXFSDDPNVTK

SEQ ID NO: 3072 - protein, 11 aa, Artificial Sequence
  Peptide containing doubly oxidized tryptophan (N-formylkynurenine) from the human cardiac proteome.
  MOD_RES 3: Xaa = N-formylkynurenine
EQXDTIEELIR

SEQ ID NO: 3073 - protein, 8 aa, Artificial Sequence
  Peptide containing doubly oxidized tryptophan (N-formylkynurenine) from the human cardiac proteome.
  MOD_RES 3: Xaa = N-formylkynurenine
GAXSNVLR

SEQ ID NO: 3074 - protein, 10 aa, Artificial Sequence
  Peptide containing doubly oxidized tryptophan (N-formylkynurenine) from the human cardiac proteome.
  MOD_RES 1: Xaa = N-formylkynurenine
XYYNAAGFNK

SEQ ID NO: 3075 - protein, 14 aa, Artificial Sequence
  Peptide containing doubly oxidized tryptophan (N-formylkynurenine) from the human cardiac proteome.
  MOD_RES 13: Xaa = N-formylkynurenine
ELDSITPEVLPGXK

SEQ ID NO: 3076 - protein, 13 aa, Artificial Sequence
  Peptide containing doubly oxidized tryptophan (N-formylkynurenine) from the human cardiac proteome.
  MOD_RES 7: Xaa = N-formylkynurenine
APLAEEXDNMTMK

SEQ ID NO: 3077 - protein, 9 aa, Artificial Sequence
  Peptide containing doubly oxidized tryptophan (N-formylkynurenine) from the human cardiac proteome.
  MOD_RES 5: Xaa = N-formylkynurenine
LATFXYYAK

What is claimed is:

1. A method for identifying a mitochondrial target for therapeutic intervention in treatment of a disease associated with altered mitochondrial function, comprising:
(a) determining a presence, in a biological sample from a subject known to have or suspected of having a disease associated with altered mitochondrial function, of at least one modified polypeptide, said modified polypeptide comprising at least one modification to a polypeptide having an amino acid sequence as set forth in any one of SEQ ID NOS 1-3025; and
(b) correlating the modification with at least one disease associated with altered mitochondrial function, and therefrom identifying a mitochondrial target for therapeutic intervention.

2. The method of claim 1 wherein the modified polypeptide exhibits altered biological activity.

3. The method of claim 1 wherein the biological sample is selected from the group consisting of blood, skin, skeletal muscle, liver and cartilage.

4. The method of claim 1 wherein the disease associated with altered mitochondrial function is selected from the group consisting of Alzheimer's disease, diabetes mellitus, Parkinson's disease, Huntington's disease, osteoarthritis, dystonia, Leber's hereditary optic neuropathy (LHON), mitochondrial encephalopathy, lactic acidosis, and stroke (MELAS), myoclonic epilepsy ragged red fiber syndrome (MERRF) and cancer.

5. The method of claim 1 wherein the modification is selected from the group consisting of an amino acid substitution, an amino acid insertion, an amino acid deletion, a posttranslational modification and an altered expression level.

6. The method of claim 4 wherein the posttranslational modification is selected from the group consisting of glycosylation, phosphorylation, nitration, nitrosylation, amidation, fatty acylation and oxidative modification.

7. A method of identifying an agent for treating a disease associated with altered mitochondrial function, comprising:
(a) contacting a candidate agent with a biological sample from a subject having a disease associated with altered mitochondrial function, wherein said sample comprises at least one polypeptide that exhibits altered biological activity which accompanies said disease and wherein the polypeptide is selected from the group consisting of (i) a polypeptide having an amino acid sequence as set forth in any one of SEQ ID NOS 1-3025 and (ii) a modified polypeptide that comprises at least one modification to a polypeptide having an amino acid sequence as set forth in any one of SEQ ID NOS 1-3025; and
(b) determining an increase or decrease in the altered biological activity of the polypeptide in the presence of the candidate agent relative to the level of the altered biological activity in the absence of the candidate agent, and therefrom identifying an agent for treating a disease associated with altered mitochondrial function.

8. The method of claim 7 wherein the altered biological activity is an indicator of altered mitochondrial function that is selected from the group consisting of ATP biosynthesis, oxidative phosphorylation, calcium uptake, calcium release, maintenance of inner mitochondrial membrane potential, mitochondrial permeability transition, ETC-mediated electron transport and intermembrane space protein release.

9. The method of claim 7 wherein the sample is selected from the group consisting of a cell, a mitochondria enriched sample, an isolated mitochondrion and a submitochondrial particle.

10. The method of claim 7 wherein the disease associated with altered mitochondrial function is selected from the group consisting of Alzheimer's disease, diabetes mellitus, Parkinson's disease, Huntington's disease, osteoarthritis, dystonia, Leber's hereditary optic neuropathy (LHON), mitochondrial encephalopathy, lactic acidosis, and stroke (MELAS), myoclonic epilepsy ragged red fiber syndrome (MERRF), and cancer.

11. A method of treating a disease associated with altered mitochondrial function comprising administering to a subject in need thereof an agent that compensates for at least one biological activity of a polypeptide that exhibits altered biological activity which accompanies said disease, wherein the polypeptide is selected from the group consisting of (i) a polypeptide having an amino acid sequence as set forth in any one of SEQ ID NOS 1-3025 and (ii) a modified polypeptide that comprises at least one modification to a polypeptide having an amino acid sequence as set forth in any one of SEQ ID NOS 1-3025.

12. A method for identifying a risk for having or a presence of a disease associated with altered mitochondrial function, comprising:
(a) determining a presence, in a biological sample from a subject suspected of having a disease associated with altered mitochondrial function, of at least one modified polypeptide, said modified polypeptide comprising at least one modification to a polypeptide having an amino acid sequence as set forth in any one of SEQ ID NOS 1-3025, wherein the modification correlates with at least one disease associated with altered mitochondrial function, and therefrom identifying a risk for or presence of disease.

13. A method of identifying an agent for treating a disease associated with altered mitochondrial function, comprising:
(a) contacting a candidate agent with an isolated polypeptide that exhibits altered biological activity which accompanies a disease associated with altered mitochondrial function, wherein the polypeptide is selected from the group consisting of (i) a polypeptide having an amino acid sequence as set forth in any one of SEQ ID NOS 1-3025 and (ii) a modified polypeptide that comprises at least one modification to a polypeptide having an amino acid sequence as set forth in any one of SEQ ID NOS 1-3025; and
(b) determining an increase or decrease in the altered biological activity of the polypeptide in the presence of the candidate agent relative to the level of the altered biological activity in the absence of the candidate agent, and therefrom identifying an agent for treating a disease associated with altered mitochondrial function.

14. The method of claim 13 wherein the disease associated with altered mitochondrial function is selected from the group consisting of Alzheimer's disease, diabetes mellitus, Parkinson's disease, Huntington's disease, osteoarthritis, dystonia, Leber's hereditary optic neuropathy (LHON), mitochondrial encephalopathy, lactic acidosis, and stroke (MELAS), myoclonic epilepsy ragged red fiber syndrome (MERRF), and cancer.

15. The method of claim 13 wherein the isolated polypeptide is present in a preparation that is selected from the group consisting of a submitochondrial particle, a proteoliposome and a mitochondrial protein fraction.

16. A method of identifying an agent for treating a disease associated with altered mitochondrial function, comprising:
(a) administering a candidate agent to a subject having a disease associated with altered mitochondrial function; and
(b) determining, in a first biological sample obtained from the subject prior to the step of administering the candidate agent and in a second biological sample obtained from the subject subsequent to the step of administering the candidate agent, wherein each of said first and second samples comprises at least one polypeptide that exhibits altered biological activity which accompanies said disease and wherein the polypeptide is selected from the group consisting of (i) a polypeptide having an amino acid sequence as set forth in any one of SEQ ID NOS 1-3025 and (ii) a modified polypeptide that comprises at least one modification to a polypeptide having an amino acid sequence as set forth in any one of SEQ ID NOS 1-3025,
an increase or decrease in the altered biological activity of the polypeptide in the second sample relative to the level of the altered biological activity in the first sample, and therefrom identifying an agent for treating a disease associated with altered mitochondrial function.

17. The method of claim 16 wherein the altered biological activity is an indicator of altered mitochondrial function that is selected from the group consisting of ATP biosynthesis, oxidative phosphorylation, calcium uptake, calcium release, maintenance of inner mitochondrial membrane potential, mitochondrial permeability transition, ETC-mediated electron transport and intermembrane space protein release.

18. The method of claim 16 wherein the sample is selected from the group consisting of a cell, a mitochondria enriched sample, an isolated mitochondrion and a submitochondrial particle.

19. The method of claim 16 wherein the disease associated with altered mitochondrial function is selected from the group consisting of Alzheimer's disease, diabetes mellitus, Parkinson's disease, Huntington's disease, osteoarthritis, dystonia, Leber's hereditary optic neuropathy (LHON), mitochondrial encephalopathy, lactic acidosis, and stroke (MELAS), myoclonic epilepsy ragged red fibersyndrome (MERRF), and cancer.
